(19) United States
(12) Patent Application Publication
(10) Pub. No.: US 2004/0043021 A1
(43) Pub. Date: Mar. 4, 2004

(54) Nucleotide and amino acid sequences relating to respiratory diseases and obesity

(76) Inventors: Tim Keith, Bedford, MA (US); Randall D. Little, Newtonville, MA (US); Josee Dupuis, West Newton, MA (US); Paul Van Eerdewegh, Weston, MA (US); Richard G. Del Mastro, Norfolk, MA (US); Kristina Allen, Hopkinton, MA (US)

Correspondence Address: MORGAN & FINNEGAN, L.L.P., 345 PARK AVENUE, NEW YORK, NY, 10154, US

(21) Appl. No.: 10/271,416

(22) Filed: Oct. 11, 2002

Related U.S. Application Data
(60) Provisional application No. 60/328,424, filed on Oct. 11, 2001.

(51) Int. Cl. A61K 39/395; C07H 21/04; C12P 21/02; C12N 5/06; C07K 14/47; C07K 16/42

(52) U.S. Cl. 424/131.1; 435/69.1; 435/320.1; 435/325; 530/350; 530/387.2; 536/23.5

(57) ABSTRACT

This invention relates to ADAM and Interactor genes which are associated with various diseases, including asthma. The invention also relates to the nucleotide sequences of these genes, isolated nucleic acids comprising these nucleotide sequences, and isolated polypeptides or peptides encoded thereby. The invention further relates to vectors and host cells comprising the disclosed nucleotide sequences, or fragments thereof, as well as antibodies that bind to the encoded polypeptides or peptides. Also related are ligands that modulate the activity of the disclosed genes or gene products. In addition the invention relates to methods and compositions employing the disclosed nucleic acids, polypeptides or peptides, antibodies, or ligands for use in diagnostics and therapeutics for asthma and other diseases.

### RELATED APPLICATIONS

[0001] This application claims priority to U.S. Application Serial No. 60/328,424, filed Oct. 11, 2001, which is hereby incorporated by reference in its entirety.

### FIELD OF THE INVENTION

[0002] This invention relates to ADAM family genes and other Interactor genes identified to be associated with asthma, atopy, obesity, inflammatory bowel disease, and other human diseases. The invention also relates to the nucleotide sequences of these genes, including genomic DNA sequences, cDNA sequences, single nucleotide polymorphisms, alleles, haplotypes, and alternate splice variants. The invention further relates to isolated nucleic acids comprising these nucleotide sequences, and isolated polypeptides or peptides encoded thereby. Also related are expression vectors and host cells comprising the disclosed nucleic acids or fragments thereof, as well as antibodies that bind to the encoded polypeptides or peptides. The present invention further relates to ligands that modulate the activity of the disclosed genes or gene products. The invention further relates to diagnostics and therapeutics for various diseases, including asthma, utilizing ADAM genes and other Interactor genes, polypeptides, peptides, antibodies, or ligands.

### BACKGROUND

[0003] Asthma has been linked to specific markers on human chromosomes (Wilson et al., 1998, Genomics, 53: 251-259). Furthermore, asthma has been associated with other diseases, particularly, inflammatory lung disease phenotypes such as Chronic Obstructive Lung Disease (COPD), Adult Respiratory Distress Syndrome (ARDS), atopy, obesity, and inflammatory bowel disease.

[0004] Recently, an ADAM (A Disintegrin And Metalloprotease) family gene, ADAM33 (Gene 216), has been linked to asthma as described in U.S. patent application Ser. No. 09/834,597. The ADAM gene family, of which there are currently 33 members, is a sub-group of the zinc-dependent metalloprotease superfamily. ADAMs have a complex domain organization that includes a signal sequence, propeptide, metalloprotease, disintegrin, cysteine-rich, and epidermal growth factor-like domains, as well as a transmembrane region and cytoplasmic tail. ADAM proteins have been implicated in many processes such as proteolysis in the secretory pathway and extracellular matrix, extra- and intra-cellular signaling, processing of plasma membrane proteins and procytokine conversion.

[0005] Thus, there is a need in the art for the identification of other ADAM gene family members, substrates, and interactors that are involved in asthma and related disorders. Identification and characterization of such genes will allow the development of effective diagnostics and therapeutic means to diagnose, prevent, and treat lung related disorders, especially asthma, as well as the other diseases described herein.

### SUMMARY OF THE INVENTION

[0006] This invention relates to ADAM family genes and other Interactor genes associated with asthma, and related diseases thereof. In specific embodiments, the invention relates to the ADAM and Interactor genes shown in Table 2, as well as complementary sequences, sequence variants, or fragments thereof, as described herein. The present invention also encompasses nucleic acid probes and primers useful for assaying a biological sample for the presence or expression of ADAM and Interactor genes. In particular, this invention relates to the use of ADAM family and Interactor genes for the treatment and prevention of asthma, and related diseases thereof.

[0007] The invention further encompasses novel nucleic acid variants comprising alleles or haplotypes of single nucleotide polymorphisms (SNPs) identified in several of the ADAM and Interactor genes. Nucleic acid variants comprising SNP alleles or haplotypes can be used to diagnose diseases such as asthma, or to determine a genetic predisposition thereto. In addition, the present invention encompasses nucleic acids comprising alternate splicing variants.

[0008] This invention also relates to vectors and host cells comprising ADAM and Interactor genes and nucleic acid sequences disclosed herein. Such vectors can be used for nucleic acid preparations, including antisense nucleic acids, and for the expression of encoded polypeptides or peptides. Host cells can be prokaryotic or eukaryotic cells. In specific embodiments, an expression vector comprises a DNA sequence encoding a known ADAM or Interactor gene, sequence variants, or fragments thereof, as described herein.

[0009] The present invention further relates to isolated ADAM or Interactor gene polypeptides and peptides. In specific embodiments, the polypeptides or peptides comprise the amino acid sequences encoded by the ADAM or Interactor gene sequence variants, or portions thereof, as described herein. In addition, this invention encompasses isolated fusion proteins comprising ADAM and Interactor polypeptides or peptides.

[0010] The present invention also relates to isolated antibodies, including monoclonal and polyclonal antibodies, and antibody fragments, that are specifically reactive with the ADAM and Interactor polypeptides, fusion proteins, variants, or portions thereof, as disclosed herein. In specific embodiments, monoclonal antibodies are prepared to be specifically reactive with a ADAM or Interactor polypeptides, peptides, or sequence variants thereof.

[0011] In addition, the present invention relates to methods of obtaining ADAM and Interactor polynucleotides and polypeptides, variant sequences, or fragments thereof, as disclosed herein. Also related are methods of obtaining antibodies and antibody fragments that bind to ADAM and Interactor polypeptides, variant sequences, or fragments thereof. The present invention also encompasses methods of obtaining ADAM and Interactor ligands, e.g., agonists, antagonists, inhibitors, and binding factors. Such ligands can be used as therapeutics for asthma and related diseases.

[0012] The present invention also relates to diagnostic methods and kits utilizing ADAM and Interactor (wild-type, mutant, or variant) nucleic acids, polypeptides, antibodies, or functional fragments thereof. Such factors can be used, for example, in diagnostic methods and kits for measuring expression levels or obtaining ADAM or Interactor gene expression, and to screen for various diseases, especially asthma. In addition, the ADAM and Interactor nucleic acids described herein can be used to identify chromosomal abnormalities correlating with asthma and other related diseases.

[0013] The present invention further relates to methods and therapeutics for the treatment of various diseases, including asthma, atopy, obesity, and inflammatory bowel disease. In various embodiments, therapeutics comprising the disclosed ADAM and Interactor gene nucleic acids, polypeptides, antibodies, ligands, variants, derivatives, or portions thereof, are administered to a subject to treat, prevent, or ameliorate such diseases. Specifically related are therapeutics comprising ADAM and Interactor gene antisense nucleic acids, monoclonal antibodies, and gene therapy vectors. Such therapeutics can be administered alone, or in combination with one or more disease treatments.

[0014] In addition, this invention relates to non-human transgenic animals and cell lines comprising one or more of the disclosed ADAM or Interactor gene nucleic acids, which can be used for drug screening, protein production, and other purposes. Also related are non-human knock-out animals and cell lines, wherein one or more endogenous ADAM or Interactor genes (i.e., orthologs), or portions thereof, are deleted or replaced by marker genes.

[0015] This invention further relates to methods of identifying ADAM and Interactor proteins that are candidates for being involved in asthma and related diseases (i.e., a “candidate protein”). Such proteins are identified by a method comprising: 1) identifying a protein in a first individual having the asthma phenotype; 2) identifying an ADAM-related or Interactor protein in a second individual not having the asthma phenotype; and 3) comparing the protein of the first individual to the protein(s) of the second individual, wherein a) the protein that is present in the second individual but not the first individual is the candidate protein; or b) the protein that is present in a higher amount in the second individual than in the first individual is the candidate protein; or c) the protein that is present in a lower amount in the second individual than in the first individual is the candidate protein.

### BRIEF DESCRIPTION OF THE FIGURES

[0016] FIG. 1 shows the cDNA sequence for Gene 803 splice variant 1 (Accession No. NM_{—}003025) with the SNPs underlined.

[0017] FIG. 2 shows the cDNA sequence for Gene 803 splice variant 2 (Accession No. AK_{—}097616) with the SNPs underlined.

[0018] FIG. 3 shows the cDNA sequence of Gene 845 (Accession No. NM_{—}023038) with the SNPs underlined.

[0019] FIG. 4 shows the cDNA sequence for Gene 847 splice variant 1 (Accession No. NM_{—}004883) with the SNPs underlined.

[0020] FIG. 5 shows the cDNA sequence for Gene 847 splice variant 2 (Accession No. NM_{—}013981) with the SNPs underlined.

[0021] FIG. 6 shows the cDNA sequence for Gene 847 splice variant 3 (Accession No. NM_{—}013982) with the SNPs underlined.

[0022] FIG. 7 shows the cDNA sequence for Gene 847 splice variant 4 (Accession No. NM_{—}013983) with the SNPs underlined.

[0023] FIG. 8 shows the cDNA sequence for Gene 847 splice variant 5 (Accession No. NM_{—}013984) with the SNPs underlined.

[0024] FIG. 9 shows the cDNA sequence for Gene 847 splice variant 6 (Accession No. NM_{—}013985) with the SNPs underlined.

[0025] FIG. 10 shows the cDNA sequence for Gene 874 (Accession No. NM_{—}003026) with the SNPs underlined.

[0026] FIG. 11 shows the cDNA sequence for Gene 962 splice variant 1 (Accession No. NM_{—}014244) with the SNPs underlined.

[0027] FIG. 12 shows the cDNA sequence for Gene 962 splice variant 2 (Accession No. NM_{—}021599) with the SNPs underlined.

### DETAILED DESCRIPTION OF THE INVENTION

[0028] This invention is based on the discovery that ADAM genes and Interactor genes are associated with various diseases, including asthma, atopy, inflammatory bowel disease, and obesity.

[0029] To aid in the understanding of the specification and claims, the following definitions are provided.

### DEFINITIONS

[0030] “ADAM genes” or “ADAM family genes” or “ADAM-related genes” refers to the zinc-dependent metalloprotease gene superfamily comprised of multiple subgroups. Currently, there are 33 members of the ADAM family. The ADAM genes encode proteins of approximately 750 amino acids with 8 different domains. Domain I is a pre-domain and contains the signal sequence peptide that facilitates secretion through the plasma membrane. Domain II is a pro-domain that is cleaved before the protein is secreted resulting in activation of the catalytic domain. Domain III is a catalytic domain containing metalloprotease activity. Domain IV is a disintegrin-like domain and is believed to interact with integrins or other receptors. Domain V is a cysteine-rich domain and is speculated to be involved in protein-protein interactions or in the presentation of the disintegrin-like domain. Domain VI is an EGF-like domain that plays a role in stimulating membrane fusion. Domain VII is a transmembrane domain that anchors the ADAM protein to the membrane. Domain VIII is a cytoplasmic domain and contains binding sites for cytoskeletal-associated proteins and SH3 binding domains that may play a role in bi-directional signaling.

[0031] “Interactor genes” or “Interactors” refer to genes or proteins whose members interact with, are ligands or substrates for, or otherwise act in concert with ADAM family genes in the cellular processes or pathways associated with the diseases described herein. Examples of Interactor genes include those shown in Table 2, such as the Neuregulin and Endophilin family genes.

[0032] “Disorder region” refers to a portion of the human chromosome correlated with the disease type. A “disorder-associated” nucleic acid or “disorder-associated” polypeptide sequence refers to a nucleic acid sequence that maps to the disorder region and polypeptides encoded thereby. For nucleic acid sequences, this encompasses sequences that are homologous or complementary to the reference sequence, as well as “sequence-conservative variants” and “function-conservative variants.” For polypeptide sequences, this encompasses “function-conservative variants.” Also encompassed are naturally occurring mutations associated with respiratory diseases including, but not limited to, asthma and atopy, as well as other diseases arising from mutations in this region including those described in detail herein. These mutations are not limited to mutations that cause inappropriate expression (e.g., lack of expression, over-expression, and expression in an inappropriate tissue type).

[0033] The term “SNP” as used herein refers to a site in a nucleic acid sequence that contains a nucleotide polymorphism. In accordance with this invention, a SNP may comprise one of two possible “alleles”. For example SNP E+1 may comprise allele C or T (Table 5, below). Thus, a nucleic acid molecule comprising SNP E+1 may include a C or T at the polymorphic position. For a combination of SNPs, the term “haplotype” is used. As an example, the haplotype A/C is observed for SNP combination G1/V−1 (Table 24, below). Thus, A is present at the polymorphic position in SNP G1 and C is present in the polymorphic position in SNP V−1. It should be noted that haplotype representation “A/C” does not indicate “A or C”. Instead, the haplotype representation “A/C” indicates that both the A allele and the C allele are present in their respective SNPs. In addition, the SNP representation “G1/V−1” does not indicate “G1 or V−1”. Instead, “G1/V−1” indicates that both SNPs are present. In some instances, a specific allele or haplotype may be associated with susceptibility to a disease or condition of interest, e.g. asthma. In other instances, an allele or haplotype may be associated with a decrease in susceptibility to a disease or condition of interest, i.e., a protective sequence.

[0034] “Sequence-conservative” variants are those in which a change of one or more nucleotides in a given codon position results in no alteration in the amino acid encoded at that position (i.e., silent mutations). “Function-conservative” variants are those in which a change in one or more nucleotides in a given codon position results in a polypeptide sequence in which a given amino acid residue in a polypeptide has been changed without substantially altering the overall conformation and function of the native polypeptide, including, but not limited to, replacement of an amino acid with one having similar physico-chemical properties (such as, for example, acidic, basic, hydrophobic, and the like). “Function-conservative” variants also include analogs of a given polypeptide and any polypeptides that have the ability to elicit antibodies specific to a designated polypeptide.

[0035] “Nucleic acid or “polynucleotide” as used herein refers to purine- and pyrimidine-containing polymers of any length, either polyribonucleotides or polydeoxyribonucleotide or mixed polyribo-polydeoxyribonucleotides. This includes single-and double-stranded molecules, i.e., DNA-DNA, DNA-RNA and RNA-RNA hybrids, as well as “protein nucleic acids” (PNA) formed by conjugating bases to an amino acid backbone. This also includes nucleic acids containing modified bases.

[0036] A “coding sequence” or a “protein-coding sequence” is a polynucleotide sequence capable of being transcribed into mRNA and capable of being translated into a polypeptide. The boundaries of the coding sequence are typically determined by a translation start codon at the 5′-terminus and a translation stop codon at the 3′-terminus.

[0037] As used herein, the “reference sequence” refers to the sequence used to compare individuals in identifying single nucleotide polymorphisms and the like. Reference sequences may be referred to herein by their GenBank Accession number, GeneBank Protein Accession number, GeneBank Genomic Contig Accession number, Genebank Genomic Clone Accession number, or by specific markers. “Variant” sequences refer to nucleotide sequences (and in some cases, the encoded amino acid sequences) that differ from the reference sequence(s) at one or more positions. Non-limiting examples of variant sequences include the disclosed single nucleotide polymorphisms (SNPs), including SNP alleles and haplotypes, alternate splice variants, and the amino acid sequences encoded by these variants.

[0038] “Expressed Sequence Tag (EST)” is a nucleic acid that encodes for a portion of or a full-length protein sequence.

[0039] A “complement” of a nucleic acid sequence as used herein refers to the “antisense” sequence that participates in Watson-Crick base-pairing with the original sequence.

[0040] A “probe” refers to a nucleic acid or oligonucleotide that forms a hybrid structure with a sequence in a target region due to complementarily of at least one sequence in the probe with a sequence in the target region.

[0041] Nucleic acids are “hybridizable” to each other when at least one strand of nucleic acid can anneal to another nucleic acid strand under defined stringency conditions. As is well known in the art, stringency of hybridization is determined, e.g., by (a) the temperature at which hybridization and washing is performed, and (b) the ionic strength and polarity (e.g., formamide) of the hybridization and washing solutions, as well as other parameters. Hybridization requires that the two nucleic acids contain substantially complementary sequences; depending on the stringency of hybridization, however, mismatches may be tolerated. The appropriate stringency for hybridizing nucleic acids depends on the length of the nucleic acids and the degree of complementarily, variables well known in the art.

[0042] “Gene” refers to a DNA sequence that encodes through its template or messenger RNA a sequence of amino acids characteristic of a specific peptide, polypeptide, or protein. The term “gene” as used herein with reference to genomic DNA includes intervening, non-coding regions, as well as regulatory regions, and can include 5′ and 3′ ends.

[0043] “Gene sequence” refers to a DNA molecule, including a DNA molecule that contains a non-transcribed or non-translated sequence. The term is also intended to include any combination of gene(s), gene fragment(s), non-transcribed sequence(s), or non-translated sequence(s) that are present on the same DNA molecule.

[0044] A gene sequence is “wild-type” if such sequence is usually found in individuals unaffected by the disease or condition of interest. However, environmental factors and other genes can also play an important role in the ultimate determination of the disease. In the context of complex diseases involving multiple genes (“oligogenic disease”), the “wild type”, or normal sequence can also be associated with a measurable risk or susceptibility, receiving its reference status based on its frequency in the general population. As used herein, “wild-type” refers to the reference sequence. The wild-type sequences are used to identify the variants (single nucleotide polymorphisms) described in detail herein.

[0045] A gene sequence is a “mutant” sequence if it differs from the wild-type sequence. For example, an ADAM-related gene nucleic acid sequence containing a single nucleotide polymorphism is a mutant sequence. In some cases, the individual carrying such genes has increased susceptibility toward the disease or condition of interest. In other cases, the “mutant” sequence might also refer to a sequence that decreases the susceptibilty toward a disease or condition of interest, and thus acting in a protective manner. Also a gene is a “mutant” gene if too much (“overexpressed”) or too little (“underexpressed”) of such gene is expressed in the tissues in which such gene is normally expressed, thereby causing the disease or condition of interest.

[0046] “cDNA” refers to complementary or copy DNA produced from an RNA template by the action of RNA-dependent DNA polymerase (reverse transcriptase). Thus, a “cDNA clone” means a duplex DNA sequence complementary to an RNA molecule of interest, carried in a cloning vector or PCR amplified. This term includes genes from which the intervening sequences have been removed.

[0047] “Recombinant DNA” means a molecule that has been recombined by in vitro splicing/and includes cDNA or a genomic DNA sequence.

[0048] “Cloning” refers to the use of in vitro recombination techniques to insert a particular gene or other DNA sequence into a vector molecule. In order to successfully clone a desired gene, it is necessary to use methods for generating DNA fragments, for joining the fragments to vector molecules, for introducing the composite DNA molecule into a host cell in which it can replicate, and for selecting the clone having the target gene from amongst the recipient host cells.

[0049] “cDNA library” refers to a collection of recombinant DNA molecules containing cDNA inserts, which together comprise the entire genome of an organism. Such a cDNA library can be prepared by methods known to one skilled in the art and described by, for example, Cowell and Austin, 1997, “cDNA Library Protocols,” Methods in Molecular Biology. Generally, RNA is first isolated from the cells of an organism from whose genome it is desired to clone a particular gene.

[0050] The term “vector” as used herein refers to a nucleic acid molecule capable of replicating another nucleic acid to which it has been linked. A vector, for example, can be a plasmid.

[0051] “Cloning vector” refers to a plasmid or phage DNA or other DNA sequence that is able to replicate in a host cell. The cloning vector is characterized by one or more endonuclease recognition sites at which such DNA sequences may be cut in a determinable fashion without loss of an essential biological function of the DNA, which may contain a marker suitable for use in the identification of transformed cells.

[0052] “Expression vector” refers to a vehicle or vector similar to a cloning vector but which is capable of expressing a nucleic acid sequence that has been cloned into it, after transformation into a host. A nucleic acid sequence is “expressed” when it is transcribed to yield an mRNA sequence. In most cases, this transcript will be translated to yield amino acid sequence. The cloned gene is usually placed under the control of (i.e., operably linked to) an expression control sequence.

[0053] “Expression control sequence” or “regulatory sequence” refers to a nucleotide sequence that controls or regulates expression of structural genes when operably linked to those genes. These include, for example, the lac systems, the trp system, major operator and promoter regions of the phage lambda, the control region of fd coat protein and other sequences known to control the expression of genes in prokaryotic or eukaryotic cells. Expression control sequences will vary depending on whether the vector is designed to express the operably linked gene in a prokaryotic or eukaryotic host, and may contain transcriptional elements such as enhancer elements, termination sequences, tissue-specificity elements or translational initiation and termination sites.

[0054] “Operably linked” means that the promoter controls the initiation of expression of the gene. A promoter is operably linked to a sequence of proximal DNA if upon introduction into a host cell the promoter determines the transcription of the proximal DNA sequence(s) into one or more species of RNA. A promoter is operably linked to a DNA sequence if the promoter is capable of initiating transcription of that DNA sequence.

[0055] “Host” includes prokaryotes and eukaryotes. The term includes an organism or cell that is the recipient of a replicable expression vector.

[0056] The introduction of the nucleic acids into the host cell by any method known in the art, including those described herein, will be referred to herein as “transformation.” The cells into which have been introduced nucleic acids described above are meant to also include the progeny of such cells.

[0057] “Amplification of nucleic acids” refers to methods such as polymerase chain reaction (PCR), ligation amplification (or ligase chain reaction, LCR) and amplification methods based on the use of Q-beta replicase. These methods are well known in the art and described, for example, in U.S. Pat. Nos. 4,683,195 and 4,683,202. Reagents and hardware for conducting PCR are commercially available. Primers useful for amplifying sequences from the disorder region are preferably complementary to, and preferably hybridize specifically to, sequences in the disorder region_or in regions that flank a target region therein. Genes generated by amplification may be sequenced directly. Alternatively, the amplified sequence(s) may be cloned prior to sequence analysis.

[0058] A nucleic acid or fragment thereof is “substantially homologous” or “substantially similar” to another if, when optimally aligned (with appropriate nucleotide insertions or deletions) with the other nucleic acid (or its complementary strand), there is nucleotide sequence identity in at least 60% of the nucleotide bases, usually at least 70%, more usually at least 80%, preferably at least 90%, and more preferably at least 95-98% of the nucleotide bases.

[0059] Alternatively, substantial homology or similarity exists when a nucleic acid or fragment thereof will hybridize, under selective hybridization conditions, to another nucleic acid (or a complementary strand thereof). Selectivity of hybridization exists when hybridization which is substantially more selective than total lack of specificity occurs. Typically, selective hybridization will occur when there is at least 55% homology over a stretch of at least nine or more nucleotides, preferably at least 65%, more preferably at least 75%, and most preferably at least 90% (see, M. Kanehisa, 1984, Nucl. Acids Res. 11:203-213). The length of homology comparison, as described, may be over longer stretches, and in certain embodiments will often be over a stretch of at least 14 nucleotides, usually at least 20 nucleotides, more usually at least 24 nucleotides, typically at least 28 nucleotides, more typically at least 32 nucleotides, and preferably at least 36 or more nucleotides.

[0060] Nucleic acids referred to herein as “isolated” are nucleic acids separated away from the nucleic acids of the genomic DNA or cellular RNA of their source of origin (e.g., as it exists in cells or in a mixture of nucleic acids such as a library), and may have undergone further processing. “Isolated”, as used herein, refers to nucleic or amino acid sequences that are at least 60% free, preferably 75% free, and most preferably 90% free from other components with which they are naturally associated. “Isolated” nucleic acids (polynucleotides) include nucleic acids obtained by methods described herein, similar methods or other suitable methods, including essentially pure nucleic acids, nucleic acids produced by chemical synthesis, by combinations of biological and chemical methods, and recombinant nucleic acids which are isolated. Nucleic acids referred to herein as “recombinant” are nucleic acids which have been produced by recombinant DNA methodology, including those nucleic acids that are generated by procedures which rely upon a method of artificial replication, such as the polymerase chain reaction (PCR) or cloning into a vector using restriction enzymes. “Recombinant” nucleic acids are also those that result from recombination events that occur through the natural mechanisms of cells, but are selected for after the introduction to the cells of nucleic acids designed to allow or make probable a desired recombination event. Portions of the isolated nucleic acids which code for polypeptides having a certain function can be identified and isolated by, for example, the method of Jasin, M., et al., U.S. Pat. No. 4,952,501.

[0061] In the context of this invention, the term “oligonucleotide” refers to naturally occurring species or synthetic species formed from naturally occurring subunits or their close homologs. The term may also refer to moieties that function similarly to oligonucleotides, but have non-naturally-occurring portions. Thus, oligonucleotides may have altered sugar moieties or inter-sugar linkages. Exemplary among these are phosphorothioate and other sulfur containing species which are known in the art.

[0062] As used herein, the terms “protein” and “polypeptide” are synonymous. “Peptides” are defined as fragments or portions of polypeptides, preferably fragments or portions having at least one functional activity (e.g., proteolysis, adhesion, fusion, antigenic, or intracellular activity) as the complete polypeptide sequence.

[0063] As used herein, “isolated” proteins or polypeptides are proteins or polypeptides purified to a state beyond that in which they exist in cells. In a preferred embodiment, they are at least 10% pure; i.e., most preferably they are substantially purified to 80 or 90% purity. “Isolated” proteins or polypeptides include proteins or polypeptides obtained by methods described infra, similar methods or other suitable methods, and include essentially pure proteins or polypeptides, proteins or polypeptides produced by chemical synthesis or by combinations of biological and chemical methods, and recombinant proteins or polypeptides which are isolated. Proteins or polypeptides referred to herein as “recombinant” are proteins or polypeptides produced by the expression of recombinant nucleic acids.

[0064] A “portion” as used herein with regard to a protein or polypeptide, refers to fragments of that protein or polypeptide. The fragments can range in size from 5 amino acid residues to all but one residue of the entire protein sequence. Thus, a portion or fragment can be at least 5, 5-50, 50-100, 100-200, 200-400, 400-800, or more consecutive amino acid residues of a protein or polypeptide, or variants thereof.

[0065] The term “immunogenic”, refers to the ability of a molecule (e.g., a polypeptide or peptide) to elicit a humoral or cellular immune response in a host animal.

[0066] The term “antigenic” refers to the ability of a molecule (e.g., a polypeptide or peptide) to bind to its specific antibody with sufficiently high affinity to form a detectable antigen-antibody complex.

[0067] “Antibodies” refer to polyclonal and monoclonal antibodies and fragments thereof, and immunologic binding equivalents thereof, that can bind to asthma proteins and fragments thereof or to nucleic acid sequences of ADAM-related or Interactor genes, particularly from chromosomal regions associated with asthma or a portion thereof. The term antibody is used both to refer to a homogeneous molecular entity, or a mixture such as a serum product made up of a plurality of different molecular entities.

[0068] The term “monoclonal antibody” or “monoclonal antibody composition”, as used herein, refers to a population of antibody molecules that contain only one species of an antigen binding site capable of immunoreacting with a particular epitope of a ADAM or Interactor polypeptide or peptide. A monoclonal antibody composition thus typically displays a single binding affinity for a particular ADAM or Interactor polypeptide or peptide with which it immunoreacts.

[0069] The term “ligand” as used herein describes any molecule, protein, peptide, or compound with the capability of directly or indirectly altering the physiological function, stability, or levels of a polypeptide.

[0070] A “sample” as used herein refers to a biological sample, such as, for example, tissue or fluid isolated from an individual (including, without limitation, plasma, serum, cerebrospinal fluid, lymph, tears, saliva, milk, pus, and tissue exudates and secretions) or from in vitro cell culture constituents, as well as samples obtained from, for example, a laboratory procedure.

[0071] As used herein, the term “ortholog” denotes a gene or polypeptide obtained from one species that has homology to an analogous gene or polypeptide from a different species. This is in contrast to “paralog”, which denotes a gene or polypeptide obtained from a given species that has homology to a distinct gene or polypeptide from that same species.

[0072] Standard reference works setting forth the general principles of recombinant DNA technology include J. Sambrook et al., 1989, Molecular Cloning: A Laboratory Manual, 2d Ed., Cold Spring Harbor Laboratory Press, Cold Spring Harbor, N.Y.; P. B. Kaufman et al., (eds), 1995, Handbook of Molecular and Cellular Methods in Biology and Medicine, CRC Press, Boca Raton; M. J. McPherson (ed), 1991, Directed Mutagenesis: A Practical Approach, IRL Press, Oxford; J. Jones, 1992, Amino Acid and Peptide Synthesis, Oxford Science Publications, Oxford; B. M. Austen and O. M. R. Westwood, 1991, Protein Targeting and Secretion, IRL Press, Oxford; D. N Glover (ed), 1985, DNA Cloning, Volumes I and II; M. J. Gait (ed), 1984, Oligonucleotide Synthesis; B. D. Hames and S. J. Higgins (eds), 1984, Nucleic Acid Hybridization; Wu and Grossman (eds), Methods in Enzymoloqy (Academic Press, Inc.), Vol. 154 and Vol. 155; Quirke and Taylor (eds), 1991, PCR-A Practical Approach; Hames and Higgins (eds), 1984, Transcription and Translation; R. I. Freshney (ed), 1986, Animal Cell Culture; Immobilized Cells and Enzymes, 1986, IRL Press; Perbal, 1984, A Practical Guide to Molecular Cloning; J. H. Miller and M. P. Calos (eds), 1987, Gene Transfer Vectors for Mammalian Cells, Cold Spring Harbor Laboratory Press; M. J. Bishop (ed), 1998, Guide to Human Genome Computing, 2d Ed., Academic Press, San Diego, Calif.; L. F. Peruski and A. H. Peruski, 1997, The Internet and the New Biology: Tools for Genomic and Molecular Research, American Society for Microbiology, Washington, D.C.

[0073] Standard reference works setting forth the general principles of immunology include S. Sell, 1996, Immunology, Immunopathology & Immunity, 5th Ed., Appleton & Lange, Publ., Stamford, Conn.; D. Male et al., 1996, Advanced Immunology, 3d Ed., Times Mirror Int'l Publishers Ltd., Publ., London; D. P. Stites and A. I. Terr, 1991, Basic and Clinical Immunology, 7th Ed., Appleton & Lange, Publ., Norwalk, Conn.; and A. K. Abbas et al., 1991, Cellular and Molecular Immunology, W. B. Saunders Co., Publ., Philadelphia, Pa. Any suitable materials and methods known to those of skill can be utilized in carrying out the present invention; however, preferred materials and methods are described. Materials, reagents, and the like to which reference is made in the following description and examples are generally obtainable from commercial sources, and specific vendors are cited herein.

### NUCLEIC ACIDS

[0074] The present invention relates to nucleic acids from ADAM and Interactor genes. In a specific embodiment, the invention relates to ADAM and Interactor nucleic acid sequences shown in column 4 of Table 2. RNA, fragments of the genomic, cDNA, or RNA nucleic acids comprising 20, 40, 60, 100, 200, 500 or more contiguous nucleotides, and the complements thereof. Closely related variants are also included as part of this invention, as well as recombinant nucleic acids comprising at least 50, 60, 70, 80, or 90% of the nucleic acids described above which would be identical to nucleic acids from ADAM and Interactor genes except for one or a few substitutions, deletions, or additions.

[0075] Further, the nucleic acids of this invention include the adjacent chromosomal regions of ADAM or Interactor genes required for accurate expression of the respective gene. In one embodiment, the present invention is directed to at least 15 contiguous nucleotides of the nucleic acid sequence of any of the sequences shown in column 4 of Table 2, SEQ ID NOs. 1-9, and FIGS. 1-12. More particularly, embodiments of this invention include BAC clones of the nucleic acid sequences of the invention.

[0076] The invention also relates to direct selected clones and EST's from ADAM and Interactor genes. In a preferred embodiment, the invention relates to clusters of nucleic acids combining the direct selected clones with EST's homologous to BAC sequences and BAC end sequences.

[0077] The invention also concerns the use of the nucleotide sequence of the nucleic acids of this invention to identify DNA probes for ADAM and Interactor genes, BAC end sequences, BACs, direct selected clones, and sequence clusters, PCR primers to amplify the ADAM and Interactor genes, nucleotide polymorphisms, and regulatory elements of the ADAM family and interactor genes.

[0078] This invention further relates to methods of using isolated or recombinant ADAM and Interactor gene sequences (DNA or RNA) that are characterized by their ability to hybridize to (a) a nucleic acid encoding a protein or polypeptide, such as a nucleic acid having any of the sequences shown in column 4 of Table 2, or (b) a fragment of the foregoing. For example, a fragment can comprise the minimum nucleotides of an ADAM or Interactor protein required to encode a functional ADAM or Interactor protein, or the minimum nucleotides to encode a polypeptide, or to encode a functional equivalent thereof. A functional equivalent can include a polypeptide, which, when incorporated into a cell, has all or part of the activity of an ADAM or Interactor protein. A functional equivalent of an ADAM or Interactor protein, therefore, would have a similar amino acid sequence (at least 65% sequence identity) and similar characteristics to, or perform in substantially the same way as an ADAM or Interactor protein. A nucleic acid which hybridizes to a nucleic acid encoding an ADAM or Interactor protein or polypeptide can be double- or single-stranded. Hybridization to DNA, such as DNA having a sequence set forth in Tables 2-5 and 7, includes hybridization to the strand shown, or to the complementary strand.

[0079] The sequences of the present invention may be derived from a variety of sources including DNA, cDNA, synthetic DNA, synthetic RNA, or combinations thereof. Such sequences may comprise genomic DNA, which may or may not include naturally occurring introns. Moreover, such genomic DNA may be obtained in association with promoter regions or poly (A) sequences. The sequences, genomic DNA, or cDNA may be obtained in any of several ways. Genomic DNA can be extracted and purified from suitable cells by means well known in the art. Alternatively, mRNA can be isolated from a cell and used to produce cDNA by reverse transcription or other means.

[0080] The present invention also relates to nucleic acids that encode a polypeptide having the amino acid sequence shown in column 5 of Table 2, or functional equivalents thereof. A functional equivalent of an ADAM or Interactor protein includes fragments or variants that perform at least one characteristic function of the ADAM or Interactor protein (e.g., antigenic or intracellular activity). Preferably, a functional equivalent will share at least 65% sequence identity with the ADAM or Interactor polypeptide.

[0081] Sequence identity calculations can be performed using computer programs, hybridization methods, or calculations. Preferred computer program methods to determine identity and similarity between two sequences include, but are not limited to, the GCG program package, BLASTN, BLASTX, TBLASTX, and FASTA (J. Devereux et al., 1984, Nucleic Acids Research 12(1):387; S. F. Altschul et al., 1990, J. Molec. Biol. 215:403-410; W. Gish and D. J. States, 1994, Nature Genet. 3:266-272; W. R. Pearson and D. J. Lipman, 1988, Proc Natl. Acad. Sci. USA 85(8):2444-8). The BLAST programs are publicly available from NCBI and other sources. The well-known Smith Waterman algorithm may also be used to determine identity.

[0082] For example, nucleotide sequence identity can be determined by comparing a query sequences to sequences in publicly available sequence databases (NCBI) using the BLASTN2 algorithm (S. F. Altschul et al., 1997, Nucl. Acids Res., 25:3389-3402). The parameters for a typical search are: E=0.05, v=50, B=50, wherein E is the expected probability score cutoff, V is the number of database entries returned in the reporting of the results, and B is the number of sequence alignments returned in the reporting of the results (S. F Altschul et al., 1990, J. Mol. Biol., 215:403-410).

[0083] In another approach, nucleotide sequence identity can be calculated using the following equation: % identity=(number of identical nucleotides)/(alignment length in nucleotides)*100. For this calculation, alignment length includes internal gaps but not includes terminal gaps. Alternatively, nucleotide sequence identity can be determined experimentally using the specific hybridization conditions described below.

[0084] In accordance with the present invention, polynucleotide alterations are selected from the group consisting of at least one nucleotide deletion, substitution, including transition and transversion, insertion, or modification (e.g., via RNA or DNA analogs). Alterations may occur at the 5′ or 3′ terminal positions of the reference nucleotide sequence or anywhere between those terminal positions, interspersed either individually among the nucleotides in the reference sequence or in one or more contiguous groups within the reference sequence. Alterations of a polynucleotide sequence of any one of the sequences shown in Table 2 may create nonsense, missense, or frameshift mutations in this coding sequence, and thereby alter the polypeptide encoded by the polynucleotide following such alterations.

[0085] Such altered nucleic acids, including DNA or RNA, can be detected and isolated by hybridization under high stringency conditions or moderate stringency conditions, for example, which are chosen to prevent hybridization of nucleic acids having non-complementary sequences. “Stringency conditions” for hybridizations is a term of art that refers to the conditions of temperature and buffer concentration that permit hybridization of a particular nucleic acid to another nucleic acid in which the first nucleic acid may be perfectly complementary to the second, or the first and second may share some degree of complementarity that is less than perfect.

[0086] For example, certain high stringency conditions can be used which distinguish perfectly complementary nucleic acids from those of less complementarity. “High stringency conditions” and “moderate stringency conditions” for nucleic acid hybridizations are explained in F. M. Ausubel et al. (eds), 1995, Current Protocols in Molecular Biology, John Wiley and Sons, Inc., New York, N.Y., the teachings of which are hereby incorporated by reference. In particular, see pages 2.10.1-2.10.16 (especially pages 2.10.8-2.10.11) and pages 6.3.1-6.3.6. The exact conditions which determine the stringency of hybridization depend not only on ionic strength, temperature and the concentration of destabilizing agents such as formamide, but also on factors such as the length of the nucleic acid sequence, base composition, percent mismatch between hybridizing sequences and the frequency of occurrence of subsets of that sequence within other non-identical sequences. Thus, high or moderate stringency conditions can be determined empirically.

[0087] By varying hybridization conditions from a level of stringency at which no hybridization occurs to a level at which hybridization is first observed, conditions which will allow a given sequence to hybridize with the most similar sequences in the sample can be determined. Preferably the hybridizing sequences will have 60-70% sequence identity, more preferably 70-85% sequence identity, and even more preferably 90-100% sequence identity.

[0088] Typically, the hybridization reaction is initially performed under conditions of low stringency, followed by washes of varying, but higher stringency. Reference to hybridization stringency, e.g., high, moderate, or low stringency, typically relates to such washing conditions. Hybridization conditions are based on the melting temperature (Tₘ) of the nucleic acid probe or primer and are typically classified by degree of stringency of the conditions under which hybridization is measured (Ausubel et al., 1995). For example, high stringency hybridization typically occurs at about 5-10% C. below the Tₘ; moderate stringency hybridization occurs at about 10-20% below the Tₘ; and low stringency hybridization occurs at about 20-25% below the Tₘ. The melting temperature can be approximated by the formulas as known in the art, depending on a number of parameters, such as the length of the hybrid or probe in number of nucleotides, or hybridization buffer ingredients and conditions. As a general guide, Tₘ decreases approximately 1° C. with every 1% decrease in sequence identity at any given SSC concentration. Generally, doubling the concentration of SSC results in an increase in Tₘ of ˜17° C. Using these guidelines, the washing temperature can be determined empirically for moderate or low stringency, depending on the level of mismatch sought.

[0089] High stringency hybridization conditions are typically carried out at 65 to 68° C. in 0.1×SSC and 0.1% SDS. Highly stringent conditions allow hybridization of nucleic acid molecules having about 95 to 100% sequence identity. Moderate stringency hybridization conditions are typically carried out at 50 to 65° C. in 1×SSC and 0.1% SDS. Moderate stringency conditions allow hybridization of sequences having at least 80 to 95% nucleotide sequence identity. Low stringency hybridization conditions are typically carried out at 40 to 50° C. in 6×SSC and 0.1% SDS. Low stringency hybridization conditions allow detection of specific hybridization of nucleic acid molecules having at least 50 to 80% nucleotide sequence identity.

[0090] For example, high stringency conditions can be attained by hybridization in 50% formamide, 5× Denhardt's solution, 5×SSPE or SSC (1×SSPE buffer comprises 0.15 M NaCl, 10 mM Na₂HPO₄, 1 mM EDTA; 1×SSC buffer comprises 150 mM NaCl, 15 mM sodium citrate, pH 7.0), 0.2% SDS at about 42° C., followed by washing in 1×SSPE or SSC and 0.1% SDS at a temperature of at least 42° C., preferably about 55° C., more preferably about 65° C. Moderate stringency conditions can be attained, for example, by hybridization in 50% formamide, 5× Denhardt's solution, 5×SSPE or SSC, and 0.2% SDS at 42° C. to about 50° C., followed by washing in 0.2×SSPE or SSC and 0.2% SDS at a temperature of at least 42° C., preferably about 55° C., more preferably about 65° C. Low stringency conditions can be attained, for example, by hybridization in 10% formamide, 5× Denhardt's solution, 6×SSPE or SSC, and 0.2% SDS at 42° C., followed by washing in 1×SSPE or SSC, and 0.2% SDS at a temperature of about 45° C., preferably about 50° C. in 4×SSC at 60° C. for 30 min.

[0091] High stringency hybridization procedures typically (1) employ low ionic strength and high temperature for washing, such as 0.015 M NaCl/0.0015 M sodium citrate, pH 7.0 (0.1×SSC) with 0.1% sodium dodecyl sulfate (SDS) at 50° C.; (2) employ during hybridization 50% (vol/vol) formamide with 5× Denhardt's solution (0.1% weight/volume highly purified bovine serum albumin/0.1% wt/vol Ficoll/0.1% wt/vol polyvinylpyrrolidone), 50 mM sodium phosphate buffer at pH 6.5 and 5×SSC at 42° C.; or (3) employ hybridization with 50% formamide, 5×SSC, 50 mM sodium phosphate (pH 6.8), 0.1% sodium pyrophosphate, 5× Denhardt's solution, sonicated salmon sperm DNA (50 μg/ml), 0.1% SDS, and 10% dextran sulfate at 42° C., with washes at 42° C. in 0.2×SSC and 0.1% SDS.

[0092] In one particular embodiment, high stringency hybridization conditions may be attained by:

[0093] Prehybridization treatment of the support (e.g., nitrocellulose filter or nylon membrane), to which is bound the nucleic acid capable of hybridizing with any of the sequences of the invention, is carried out at 65° C. for 6 hr with a solution having the following composition: 4×SSC, 10× Denhardt's (1× Denhardt's comprises 1% Ficoll, 1% polyvinylpyrrolidone, 1% BSA (bovine serum albumin); 1×SSC comprises of 0.15 M of NaCl and 0.015 M of sodium citrate, pH 7);

[0094] Replacement of the pre-hybridization solution in contact with the support by a buffer solution having the following composition: 4×SSC, 1× Denhardt's, 25 mM NaPO₄, pH 7, 2 mM EDTA, 0.5% SDS, 100 μg/ml of sonicated salmon sperm DNA containing a nucleic acid derived from the sequences of the invention as probe, in particular a radioactive probe, and previously denatured by a treatment at 100° C. for 3 min;

[0095] Incubation for 12 hr at 65° C.;

[0096] Successive washings with the following solutions: 1) four washings with 2×SSC, 1× Denhardt's, 0.5% SDS for 45 min at 65° C.; 2) two washings with 0.2×SSC, 0.1×SSC for 45 min at 65° C.; and 3) 0.1×SSC, 0.1% SDS for 45 min at 65° C.

[0097] Additional examples of high, medium, and low stringency conditions can be found in Sambrook et al., 1989. Exemplary conditions are also described in M. H. Krause and S. A. Aaronson, 1991, Methods in Enzymology, 200:546-556; Ausubel et al., 1995. It is to be understood that the low, moderate and high stringency hybridization/washing conditions may be varied using a variety of ingredients, buffers, and temperatures well known to and practiced by the skilled practitioner.

[0098] Isolated or recombinant nucleic acids that are characterized by their ability to hybridize to a) a nucleic acid encoding an ADAM or Interactor polypeptide, such as the nucleic acids depicted in column 4 of Table 2, SEQ ID NOs. 1-9, and FIGS. 1-12; b) the complement of (a); c) or a portion of (a) or (b) (e.g., under high or moderate stringency conditions), may further encode a protein or polypeptide having at least one function characteristic of an ADAM or Interactor polypeptide, or binding of antibodies that also bind to non-recombinant ADAM or Interactor proteins or polypeptides. The catalytic or binding function of a protein or polypeptide encoded by the hybridizing nucleic acid may be detected by standard enzymatic assays for activity or binding (e.g., assays that measure the binding of a transit peptide or a precursor, or other components of the translocation machinery). Enzymatic assays, complementation tests, or other suitable methods can also be used in procedures for the identification and isolation of nucleic acids which encode a polypeptide such as a polypeptide of the amino acid sequences shown in column 5 of Table 2, or a functional equivalent of these polypeptides. The antigenic properties of proteins or polypeptides encoded by hybridizing nucleic acids can be determined by immunological methods employing antibodies that bind to an ADAM or Interactor polypeptide such as immunoblot, immunoprecipitation and radioimmunoassay. PCR methodology, including RAGE (Rapid Amplification of Genomic DNA Ends), can also be used to screen for and detect the presence of nucleic acids which encode ADAM or Interactor-like proteins and polypeptides, and to assist in cloning such nucleic acids from genomic DNA. PCR methods for these purposes can be found in Innis, M. A., et al., 1990, PCR Protocols: A Guide to Methods and Applications, Academic Press, Inc., San Diego, Calif., incorporated herein by reference.

[0099] It is understood that, as a result of the degeneracy of the genetic code, many nucleic acid sequences are possible which encode ADAM or Interactor gene-like proteins or polypeptides. Some of these will have little homology to the nucleotide sequences of any known or naturally-occurring ADAM or Interactor genes but can be used to produce the proteins and polypeptides of this invention by selection of combinations of nucleotide triplets based on codon choices. Such variants, while not hybridizable to a naturally occurring ADAM or Interactor gene, are contemplated within this invention.

[0100] Also encompassed by the present invention are alternate splice variants produced by differential processing of the primary transcript(s) of ADAM or Interactor genomic DNA. An alternate splice variant may comprise, for example, the sequences shown in Table 2 or FIGS. 1-12. Alternate splice variants can also comprise other combinations of introns/exons of ADAM or Interactor genes, which can be determined by those of skill in the art. Alternate splice variants can be determined experimentally, for example, by isolating and analyzing cellular RNAs (e.g., Southern blotting or PCR), or by screening cDNA libraries using the 12q23-qter nucleic acid probes or primers described herein. In another approach, alternate splice variants can be predicted using various methods, computer programs, or computer systems available to practitioners in the field.

[0101] General methods for splice site prediction can be found in Nakata, 1985, Nucleic Acids Res. 13:5327-5340. In addition, splice sites can be predicted using, for example, the GRAIL™ (E. C. Uberbacher and R. J. Mural, 1991, Proc. Natl. Acad. Sci. USA, 88:11261-11265; E. C. Uberbacher, 1995, Trends Biotech., 13:497-500; http://grail.lsd.ornl.gov/grailexp); GenView (L. Milanesi et al., 1993, Proceedings of the Second International Conference on Bioinformatics, Supercomputing, and Complex Genome Analysis, H. A. Lim et al. (eds), World Scientific Publishing, Singapore, pp. 573-588; http://l25.itba.mi.cnr.it/˜webgene/wwwgene_help.html); SpliceView (http://www.itba.mi.cnr.it/webgene); and HSPL (V. V. Solovyev et al., 1994, Nucleic Acids Res. 22:5156-5163; V. V. Solovyev et al., 1994, “The Prediction of Human Exons by Oligonucleotide Composition and Discriminant Analysis of Spliceable Open Reading Frames,” R. Altman et al. (eds), The Second International conference on Intelligent systems for Molecular Biology, AAAI Press, Menlo Park, Calif., pp. 354-362; V. V. Solovyev et al., 1993, “Identification Of Human Gene Functional Regions Based On Oligonucleotide Composition,” L. Hunter et al. (eds), In Proceedings of First International conference on Intelligent System for Molecular Biology, Bethesda, pp. 371-379) computer systems.

[0102] Additionally, computer programs such as GeneParser (E. E. Snyder and G. D. Stormo, 1995, J. Mol. Biol. 248: 1-18; E. E. Snyder and G. D. Stormo, 1993, Nucl. Acids Res. 21(3): 607-613; http://mcdb.colorado.edu/˜eesnyder/GeneParser.html); MZEF (M. Q. Zhang, 1997, Proc. Natl. Acad. Sci. USA, 94:565-568; http://argon.cshl.org/genefinder); MORGAN (S. Salzberg et al., 1998, J. Comp. Biol. 5:667-680; S. Salzberg et al. (eds), 1998, Computational Methods in Molecular Biology, Elsevier Science, New York, N.Y., pp. 187-203); VEIL (J. Henderson et al., 1997, J. Comp. Biol. 4:127-141); GeneScan (S. Tiwari et al., 1997, CABIOS (BioInformatics) 13: 263-270); GeneBuilder (L. Milanesi et al., 1999, Bioinformatics 15:612-621); Eukaryotic GeneMark (J. Besemer et al., 1999, Nucl. Acids Res. 27:3911-3920); and FEXH (V. V. Solovyev et al., 1994, Nucleic Acids Res. 22:5156-5163). In addition, splice sites (i.e., former or potential splice sites) in cDNA sequences can be predicted using, for example, the RNASPL (V. V. Solovyev et al., 1994, Nucleic Acids Res. 22:5156-5163); or INTRON (A. Globek et al., 1991, INTRON version 1.1 manual, Laboratory of Biochemical Genetics, NIMH, Washington, D.C.) programs.

[0103] The present invention also encompasses naturally-occurring polymorphisms of ADAM or Interactor genes. As will be understood by those in the art, the genomes of all organisms undergo spontaneous mutation in the course of their continuing evolution generating variant forms of gene sequences (Gusella, 1986, Ann. Rev. Biochem. 55:831-854). Restriction fragment length polymorphisms (RFLPs) include variations in DNA sequences that alter the length of a restriction fragment in the sequence (Botstein et al., 1980, Am. J. Hum. Genet. 32, 314-331). RFLPs have been widely used in human and animal genetic analyses (see WO 90/13668; WO90/11369; Donis-Keller, 1987, Cell 51:319-337; Lander et al., 1989, Genetics 121: 85-99). Short tandem repeats (STRs) include tandem di-, tri- and tetranucleotide repeated motifs, also termed variable number tandem repeat (VNTR) polymorphisms. VNTRs have been used in identity and paternity analysis (U.S. Pat. No. 5,075,217; Armour et al., 1992, FEBS Lett. 307:113-115; Horn et al., WO 91/14003; Jeffreys, EP 370,719), and in a large number of genetic mapping studies.

[0104] Single nucleotide polymorphisms (SNPs) are far more frequent than RFLPS, STRs, and VNTRs. SNPs may occur in protein coding (e.g., exon), or non-coding (e.g., intron, 5′UTR, 3′UTR) sequences. SNPs in protein coding regions may comprise silent mutations that do not alter the amino acid sequence of a protein. Alternatively, SNPs in protein coding regions may produce conservative or non-conservative amino acid changes, described in detail below. In some cases, SNPs, including SNP alleles and haplotypes, may give rise to the expression of a defective or other variant protein and, potentially, a genetic disease. SNPs within protein-coding sequences can give rise to genetic diseases, for example, in the β-globin (sickle cell anemia) and CFTR (cystic fibrosis) genes. In non-coding sequences, SNPs may also result in defective protein expression (e.g., as a result of defective splicing). Other single nucleotide polymorphisms have no phenotypic effects.

[0105] Single nucleotide polymorphisms can be used in the same manner as RFLPs and VNTRs, but offer several advantages. Single nucleotide polymorphisms tend to occur with greater frequency and are typically spaced more uniformly throughout the genome than other polymorphisms. Also, different SNPs are often easier to distinguish than other types of polymorphisms (e.g., by use of assays employing allele-specific hybridization probes or primers). In one embodiment of the present invention, an ADAM or Interactor nucleic acid contains at least one SNP as set forth in Tables 2-5 and 7, SEQ ID NOs. 1-9, and FIGS. 1-12, described herein. Various combinations, alleles and haplotypes of these SNPs are also encompassed by the invention. In a preferred aspect, an ADAM or Interactor SNP allele or haplotype is associated with a lung-related disorder, such as asthma. Nucleic acids comprising such SNP alleles and haplotypes can be used as diagnostic or therapeutic reagents.

[0106] The nucleic acid sequences of the present invention may be derived from a variety of sources including DNA, cDNA, synthetic DNA, synthetic RNA, or combinations thereof. Such sequences may comprise genomic DNA, which may or may not include naturally occurring introns. Moreover, such genomic DNA may be obtained in association with promoter regions or poly(A)+ sequences. The sequences, genomic DNA, or cDNA may be obtained in any of several ways. Genomic DNA can be extracted and purified from suitable cells by means well known in the art. Alternatively, mRNA can be isolated from a cell and used to produce cDNA by reverse transcription or other means.

[0107] The nucleic acids described herein are used in the methods of the present invention for production of proteins or polypeptides, through incorporation into cells, tissues, or organisms. In one embodiment, DNA containing all or part of the coding sequence for an ADAM or Interactor polypeptide, or DNA which hybridizes to DNA having the sequence of any one of the sequences shown in Tables 2-5 and 7, SEQ ID NOs. 1-9, and FIGS. 1-12, or a fragment thereof, is incorporated into a vector for expression of the encoded polypeptide in suitable host cells. The encoded amino acid sequence consisting of an ADAM or Interactor polypeptide, or its functional equivalent is capable of normal activity, such as antigenic or intracellular activity.

[0108] The invention also concerns the use of the nucleotide sequence of the nucleic acids of this invention to identify DNA probes for ADAM or Interactor genes, PCR primers to amplify ADAM or Interactor genes, nucleotide polymorphisms in ADAM or Interactor genes, and regulatory elements of ADAM or Interactor genes.

[0109] The nucleic acids of the present invention find use as primers and templates for the recombinant production of disorder-associated peptides or polypeptides, for chromosome and gene mapping, to provide antisense sequences, for tissue distribution studies, to locate and obtain full length genes, to identify and obtain homologous sequences (wild-type and mutants), and in diagnostic applications. The primers of this invention may comprise all or a portion of the nucleotide sequence of any one shown in Tables 2-5 and 7, SEQ ID NOs. 1-9, and FIGS. 1-12, or a complementary sequence thereof.

[0110] Probes may also be used for the detection of ADAM or Interactor-related sequences, and should preferably contain at least 50%, preferably at least 80%, identity to an ADAM or Interactor polynucleotide, or a complementary sequence, or fragments thereof. The probes of this invention may be DNA or RNA, the probes may comprise all or a portion of the nucleotide sequences shown in Tables 2-5 and 7, SEQ ID NOs. 1-9, and FIGS. 1-12, or a complementary sequence thereof, and may include promoter, enhancer elements, and introns of the naturally occurring ADAM or Interactor polynucleotide.

[0111] The probes and primers based on the ADAM and Interactor gene sequences disclosed herein are used to identify homologous ADAM and Interactor gene sequences and proteins in other species. These ADAM and Interactor gene sequences and proteins are used in the diagnostic/prognostic, therapeutic and drug-screening methods described herein for the species from which they have been isolated.

### VECTORS AND HOST CELLS

[0112] The nucleic acids described herein are used in the methods of the present invention for production of proteins or polypeptides, through incorporation into cells, tissues, or organisms. In one embodiment, DNA containing all or part of the coding sequence for an ADAM or Interactor polypeptide, or DNA which hybridizes to DNA having the sequences shown in Tables 2-5 and 7, SEQ ID NOs. 1-9, and FIGS. 1-12, is incorporated into a vector for expression of the encoded polypeptide in suitable host cells. The encoded polypeptides consisting of ADAM or Interactor genes, or their functional equivalents and are capable of normal activity. A large number of vectors, including bacterial, yeast, and mammalian vectors, have been described for replication and expression in various host cells or cell-free systems, and may be used for gene therapy as well as for simple cloning or protein expression.

[0113] In one aspect, an expression vectors comprises a nucleic acid encoding an ADAM or Interactor polypeptide or peptide, as described herein, operably linked to at least one regulatory sequence. Regulatory sequences are known in the art and are selected to direct expression of the desired protein in an appropriate host cell. Accordingly, the term regulatory sequence includes promoters, enhancers and other expression control elements (see D. V. Goeddel, 1990, Methods Enzymol. 185:3-7). Enhancer and other expression control sequences are described in Enhancers and Eukaryotic Gene Expression, 1983, Cold Spring Harbor Press, Cold Spring Harbor, N.Y. It should be understood that the design of the expression vector may depend on such factors as the choice of the host cell to be transfected or the type of polypeptide to be expressed.

[0114] Several regulatory elements (e.g., promoters) have been isolated and shown to be effective in the transcription and translation of heterologous proteins in the various hosts. Such regulatory regions, methods of isolation, manner of manipulation, etc. are known in the art. Non-limiting examples of bacterial promoters include the β-lactamase (penicillinase) promoter; lactose promoter; tryptophan (trp) promoter; araBAD (arabinose) operon promoter; lambda-derived P₁ promoter and N gene ribosome binding site; and the hybrid tac promoter derived from sequences of the trp and lac UV5 promoters. Non-limiting examples of yeast promoters include the 3-phosphoglycerate kinase promoter, glyceraldehyde-3-phosphate dehydrogenase (GAPDH) promoter, galactokinase (GAL1) promoter, galactoepimerase promoter, and alcohol dehydrogenase (ADH1) promoter. Suitable promoters for mammalian cells include, without limitation, viral promoters, such as those from Simian Virus 40 (SV40), Rous sarcoma virus (RSV), adenovirus (ADV), and bovine papilloma virus (BPV). Preferred replication and inheritance systems include M13, ColE1, SV40, baculovirus, lambda, adenovirus, CEN ARS, 2 μm ARS and the like. While expression vectors may replicate autonomously, they may also replicate by being inserted into the genome of the host cell, by methods well known in the art.

[0115] To obtain expression in eukaryotic cells, terminator sequences, polyadenylation sequences, and enhancer sequences that modulate gene expression may be required. Sequences that cause amplification of the gene may also be desirable. These sequences are well known in the art. Furthermore, sequences that facilitate secretion of the recombinant product from cells, including, but not limited to, bacteria, yeast, and animal cells, such as secretory signal sequences or preprotein or proprotein sequences, may also be included. Such sequences are well described in the art.

[0116] Expression and cloning vectors will likely contain a selectable marker, a gene encoding a protein necessary for survival or growth of a host cell transformed with the vector. The presence of this gene ensures growth of only those host cells that express the inserts. Typical selection genes encode proteins that 1) confer resistance to antibiotics or other toxic substances, e.g., ampicillin, neomycin, methotrexate, etc.; 2) complement auxotrophic deficiencies, or 3) supply critical nutrients not available from complex media, e.g., the gene encoding D-alanine racemase for Bacilli. Markers may be an inducible or non-inducible gene and will generally allow for positive selection. Non-limiting examples of markers include the ampicillin resistance marker (i.e., beta-lactamase), tetracycline resistance marker, neomycin/kanamycin resistance marker (i.e., neomycin phosphotransferase), dihydrofolate reductase, glutamine synthetase, and the like. The choice of the proper selectable marker will depend on the host cell, and appropriate markers for different hosts as understood by those of skill in the art.

[0117] Suitable expression vectors for use with the present invention include, but are not limited to, pUC, pBluescript (Stratagene), pET (Novagen, Inc., Madison, Wis.), and pREP (Invitrogen) plasmids. Vectors can contain one or more replication and inheritance systems for cloning or expression, one or more markers for selection in the host, e.g., antibiotic resistance, and one or more expression cassettes. The inserted coding sequences can be synthesized by standard methods, isolated from natural sources, or prepared as hybrids. Ligation of the coding sequences to transcriptional regulatory elements (e.g., promoters, enhancers, and insulators) or to other amino acid encoding sequences can be carried out using established methods.

[0118] Suitable cell-free expression systems for use with the present invention include, without limitation, rabbit reticulocyte lysate, wheat germ extract, canine pancreatic microsomal membranes, E. coli S30 extract, and coupled transcription/translation systems (Promega Corp., Madison, Wis.). These systems allow the expression of recombinant polypeptides or peptides upon the addition of cloning vectors, DNA fragments, or RNA sequences containing protein-coding regions and appropriate promoter elements.

[0119] Non-limiting examples of suitable host cells include bacteria, archea, insect, fungi (e.g., yeast), plant, and animal cells (e.g., mammalian, especially human). Of particular interest are Escherichia coli, Bacillus subtilis, Saccharomyces cerevisiae, SF9 cells, C129 cells, 293 cells, Neurospora, and immortalized mammalian myeloid and lymphoid cell lines. Techniques for the propagation of mammalian cells in culture are well-known (see, Jakoby and Pastan (eds), 1979, Cell Culture. Methods in Enzymology, volume 58, Academic Press, Inc., Harcourt Brace Jovanovich, N.Y.). Examples of commonly used mammalian host cell lines are VERO and HeLa cells, CHO cells, and WI38, BHK, and COS cell lines, although it will be appreciated by the skilled practitioner that other cell lines may be used, e.g., to provide higher expression desirable glycosylation patterns, or other features.

[0120] Host cells can be transformed, transfected, or infected as appropriate by any suitable method including electroporation, calcium chloride-, lithium chloride-, lithium acetate/polyethylene glycol-, calcium phosphate-, DEAE-dextran-, liposome-mediated DNA uptake, spheroplasting, injection, microinjection, microprojectile bombardment, phage infection, viral infection, or other established methods. Alternatively, vectors containing the nucleic acids of interest can be transcribed in vitro, and the resulting RNA introduced into the host cell by well-known methods, e.g., by injection (see, Kubo et al., 1988, FEBS Letts. 241:119). The cells into which have been introduced nucleic acids described above are meant to also include the progeny of such cells.

[0121] The nucleic acids of the invention may be isolated directly from cells. Alternatively, the polymerase chain reaction (PCR) method can be used to produce the nucleic acids of the invention, using either RNA (e.g., mRNA) or DNA (e.g., genomic DNA) as templates. Primers used for PCR can be synthesized using the sequence information provided herein and can further be designed to introduce appropriate new restriction sites, if desirable, to facilitate incorporation into a given vector for recombinant expression.

[0122] Using the information provided in Tables 2-5 and 7, SEQ ID NOs. 1-9, and FIGS. 1-12, one skilled in the art will be able to clone and sequence all representative nucleic acids of interest, including nucleic acids encoding complete protein-coding sequences. It is to be understood that non-protein-coding sequences contained within the sequences shown in Tables 2-5 and 7, SEQ ID NOs. 1-9, and FIGS. 1-12 are also within the scope of the invention. Such sequences include, without limitation, sequences important for replication, recombination, transcription, and translation. Non-limiting examples include promoters and regulatory binding sites involved in regulation of gene expression, and 5′- and 3′-untranslated sequences (e.g., ribosome-binding sites) that form part of mRNA molecules.

[0123] The nucleic acids of this invention can be produced in large quantities by replication in a suitable host cell. Natural or synthetic nucleic acid fragments, comprising at least ten contiguous bases coding for a desired peptide or polypeptide can be incorporated into recombinant nucleic acid constructs, usually DNA constructs, capable of introduction into and replication in a prokaryotic or eukaryotic cell. Usually the nucleic acid constructs will be suitable for replication in a unicellular host, such as yeast or bacteria, but may also be intended for introduction to (with and without integration within the genome) cultured mammalian or plant or other eukaryotic cells, cell lines, tissues, or organisms. The purification of nucleic acids produced by the methods of the present invention is described, for example, in Sambrook et al., 1989; F. M. Ausubel et al., 1992, Current Protocols in Molecular Biology, J. Wiley and Sons, New York, N.Y.

[0124] The nucleic acids of the present invention can also be produced by chemical synthesis, e.g., by the phosphoramidite method described by Beaucage et al., 1981, Tetra. Letts. 22:1859-1862, or the triester method according to Matteucci et al., 1981, J. Am. Chem. Soc., 103:3185, and can performed on commercial, automated oligonucleotide synthesizers. A double-stranded fragment may be obtained from the single-stranded product of chemical synthesis either by synthesizing the complementary strand and annealing the strands together under appropriate conditions or by adding the complementary strand using DNA polymerase with an appropriate primer sequence.

[0125] These nucleic acids can encode full-length variant forms of proteins as well as the wild-type protein. The variant proteins (which could be especially useful for detection and treatment of disorders) will have the variant amino acid sequences encoded by the polymorphisms described in Tables 2-5 and 7, SEQ ID NOs. 1-9, and FIGS. 1-12 when said polymorphisms are read so as to be in-frame with the full-length coding sequence of which it is a component.

[0126] Large quantities of the nucleic acids and proteins of the present invention may be prepared by expressing the ADAM or Interactor gene nucleic acids or portions thereof in vectors or other expression vectors in compatible prokaryotic or eukaryotic host cells. The most commonly used prokaryotic hosts are strains of Escherichia coli, although other prokaryotes, such as Bacillus subtilis or Pseudomonas may also be used. Mammalian or other eukaryotic host cells, such as those of yeast, filamentous fungi, plant, insect, or amphibian or avian species, may also be useful for production of the proteins of the present invention. For example, insect cell systems (i.e., lepidopteran host cells and baculovirus expression vectors) are particularly suited for large-scale protein production.

[0127] Host cells carrying an expression vector (i.e., transformants or clones) are selected using markers depending on the mode of the vector construction. The marker may be on the same or a different DNA molecule, preferably the same DNA molecule. In prokaryotic hosts, the transformant may be selected, e.g., by resistance to ampicillin, tetracycline or other antibiotics. Production of a particular product based on temperature sensitivity may also serve as an appropriate marker.

[0128] Prokaryotic or eukaryotic cells comprising the nucleic acids of the present invention will be useful not only for the production of the nucleic acids and proteins of the present invention, but also, for example, in studying the characteristics of ADAM or Interactor proteins and protein variants. Cells and animals that carry an ADAM or Interactor gene can be used as model systems to study and test for substances that have potential as therapeutic agents. The cells are typically cultured mesenchymal stem cells. These may be isolated from individuals with a somatic or germine ADAM or Interactor gene. Alternatively, the cell line can be engineered to carry an ADAM or Interactor gene, as described above. After a test substance is applied to the cells, the transformed phenotype of the cell is determined. Any trait of transformed cells can be assessed, including respiratory diseases including asthma, atopy, and response to application of putative therapeutic agents.

### ANTISENSE NUCLEIC ACIDS

[0129] A further embodiment of the invention is antisense nucleic acids or oligonucleotides which are complementary, in whole or in part, to a target molecule comprising a sense strand, and can hybridize with the target molecule. The target can be DNA, or its RNA counterpart (i.e., wherein T residues of the DNA are U residues in the RNA counterpart). When introduced into a cell, antisense nucleic acids or oligonucleotides can inhibit the expression of the gene encoded by the sense strand or the mRNA transcribed from the sense strand. Antisense nucleic acids can be produced by standard techniques. See, for example, Shewmaker, et al., U.S. Pat. No. 5,107,065.

[0130] In a particular embodiment, an antisense nucleic acid or oligonucleotide is wholly or partially complementary to and can hybridize with a target nucleic acid (either DNA or RNA), wherein the target nucleic acid can hybridize to a nucleic acid having the sequence of the complement of the strands shown in Tables 2-5 and 7, SEQ ID NOs. 1-9, and FIGS. 1-12. For example, an antisense nucleic acid or oligonucleotide can be complementary to a target nucleic acid having the sequence shown as the strand of the open reading frames in column 4 of Table 2, or nucleic acids encoding functional equivalents of ADAM or Interactor genes, or to a portion of these nucleic acids sufficient to allow hybridization. A portion, for example a sequence of 16 nucleotides, could be sufficient to inhibit expression of the protein. Or, an antisense nucleic acid or oligonucleotide, complementary to 5′ or 3′ untranslated regions, or overlapping the translation initiation codons (5′ untranslated and translated regions), of ADAM or Interactor genes, or genes encoding a functional equivalent can also be effective. In another embodiment, the antisense nucleic acid is wholly or partially complementary to and can hybridize with a target nucleic acid that encodes an ADAM or Interactor polypeptide.

[0131] In addition to the antisense nucleic acids of the invention, oligonucleotides can be constructed which will bind to duplex nucleic acids either in the genes or the DNA:RNA complexes of transcription, to form stable triple helix-containing or triplex nucleic acids to inhibit transcription and expression of a gene encoding an ADAM or Interactor gene, or their functional equivalents (Frank-Kamenetskii, M. D. and Mirkin, S. M., 1995, Ann. Rev. Biochem. 64:65-95). Such oligonucleotides of the invention are constructed using the base-pairing rules of triple helix formation and the nucleotide sequences of the genes or mRNAs for ADAM or Interactor genes.

[0132] In preferred embodiments, at least one of the phosphodiester bonds of an antisense oligonucleotide has been substituted with a structure that functions to enhance the ability of the compositions to penetrate into the region of cells where the RNA whose activity is to be modulated is located. It is preferred that such substitutions comprise phosphorothioate bonds, methyl phosphonate bonds, or short chain alkyl or cycloalkyl structures. In accordance with other preferred embodiments, the phosphodiester bonds are substituted with structures which are, at once, substantially non-ionic and non-chiral, or with structures which are chiral and enantiomerically specific. Persons of ordinary skill in the art will be able to select other linkages for use in the practice of the invention.

[0133] Oligonucleotides may also include species that include at least some modified base forms. Thus, purines and pyrimidines other than those normally found in nature may be so employed. Similarly, modifications on the furanosyl portions of the nucleotide subunits may also be effected, as long as the essential tenets of this invention are adhered to. Examples of such modifications are 2′-O-alkyl- and 2′-halogen-substituted nucleotides. Some non-limiting examples of modifications at the 2′ position of sugar moieties which are useful in the present invention include OH, SH, SCH₃, F, OCH₃, OCN, O(CH₂)ₙNH₂ and O(CH₂)ₙ CH₃, where n is from 1 to about 10. Such oligonucleotides are functionally interchangeable with natural oligonucleotides or synthesized oligonucleotides, which have one or more differences from the natural structure. All such analogs are comprehended by this invention so long as they function effectively to hybridize with an ADAM or Interactor nucleic acid to inhibit the function thereof.

[0134] The oligonucleotides in accordance with this invention preferably comprise from about 3 to about 50 subunits. It is more preferred that such oligonucleotides and analogs comprise from about 8 to about 25 subunits and still more preferred to have from about 12 to about 20 subunits. As defined herein, a “subunit” is a base and sugar combination suitably bound to adjacent subunits through phosphodiester or other bonds.

[0135] Antisense nucleic acids or oligonulcleotides can be produced by standard techniques (see, e.g., Shewmaker et al., U.S. Pat. No. 5,107,065. The oligonucleotides used in accordance with this invention may be conveniently and routinely made through the well-known technique of solid phase synthesis. Equipment for such synthesis is available from several vendors, including PE Applied Biosystems (Foster City, Calif.). Any other means for such synthesis may also be employed, however, the actual synthesis of the oligonucleotides is well within the abilities of the practitioner. It is also well known to prepare other oligonucleotide such as phosphorothioates and alkylated derivatives.

[0136] The oligonucleotides of this invention are designed to be hybridizable with ADAM or Interactor RNA (e.g., mRNA) or DNA. For example, an oligonucleotide (e.g., DNA oligonucleotide) that hybridizes to ADAM or Interactor mRNA can be used to target the mRNA for RnaseH digestion. Alternatively, an oligonucleotide that hybridizes to the translation initiation site of ADAM or Interactor mRNA can be used to prevent translation of the mRNA. In another approach, oligonucleotides that bind to the double-stranded DNA of an ADAM or Interactor gene can be administered. Such oligonucleotides can form a triplex construct and inhibit the transcription of the DNA encoding ADAM or Interactor polypeptides. Triple helix pairing prevents the double helix from opening sufficiently to allow the binding of polymerases, transcription factors, or regulatory molecules. Recent therapeutic advances using triplex DNA have been described (see, e.g., J. E. Gee et al., 1994, Molecular and Immunologic Approaches, Futura Publishing Co., Mt. Kisco, N.Y.).

[0137] As non-limiting examples, antisense oligonucleotides may be targeted to hybridize to the following regions: mRNA cap region; translation initiation site; translational termination site; transcription initiation site; transcription termination site; polyadenylation signal; 3′ untranslated region; 5′ untranslated region; 5′ coding region; mid coding region; and 3′ coding region. Preferably, the complementary oligonucleotide is designed to hybridize to the most unique 5′ sequence of an ADAM or Interactor gene, including any of about 15-35 nucleotides spanning the 5′ coding sequence. Appropriate oligonucleotides can be designed using OLIGO software (Molecular Biology Insights, Inc., Cascade, Colo.; http://www.oligo.net).

[0138] In accordance with the present invention, an antisense oligonucleotide can be synthesized, formulated as a pharmaceutical composition, and administered to a subject. The synthesis and utilization of antisense and triplex oligonucleotides have been previously described (e.g., H. Simon et al., 1999, Antisense Nucleic Acid Drug Dev. 9:527-31; F. X. Barre et al., 2000, Proc. Natl. Acad. Sci. USA 97:3084-3088; R. Elez et al., 2000, Biochem. Biophys. Res. Commun. 269:352-6; E. R. Sauter et al., 2000, Clin. Cancer Res. 6:654-60). Alternatively, expression vectors derived from retroviruses, adenovirus, herpes or vaccinia viruses, or from various bacterial plasmids may be used for delivery of nucleotide sequences to the targeted organ, tissue or cell population. Methods that are well known to those skilled in the art can be used to construct recombinant vectors that will express nucleic acid sequence that is complementary to the nucleic acid sequence encoding an ADAM or Interactor polypeptide. These techniques are described both in Sambrook et al., 1989 and in Ausubel et al., 1992. For example, ADAM or Interactor gene expression can be inhibited by transforming a cell or tissue with an expression vector that expresses high levels of untranslatable ADAM or Interactor sense or antisense sequences. Even in the absence of integration into the DNA, such vectors may continue to transcribe RNA molecules until they are disabled by endogenous nucleases. Transient expression may last for a month or more with a non-replicating vector, and even longer if appropriate replication elements included in the vector system.

[0139] Various assays may be used to test the ability of antisense oligonucleotides to inhibit ADAM or Interactor gene expression. For example, ADAM or Interactor mRNA levels can be assessed Northern blot analysis (Sambrook et al., 1989; Ausubel et al., 1992; J. C. Alwine et al. 1977, Proc. Natl. Acad. Sci. USA 74:5350-5354; I. M. Bird, 1998, Methods Mol. Biol. 105:325-36), quantitative or semi-quantitative RT-PCR analysis (see, e.g., W. M. Freeman et al., 1999, Biotechniques 26:112-122; Ren et al., 1998, Mol. Brain Res. 59:256-63; J. M. Cale et al., 1998, Methods Mol. Biol. 105:351-71), or in situ hybridization (reviewed by A. K. Raap, 1998, Mutat. Res. 400:287-298). Alternatively, ADAM or Interactor polypeptide levels can be measured, e.g., by western blot analysis, indirect immunofluorescence, immunoprecipitation techniques (see, e.g., J. M. Walker, 1998, Protein Protocols on CD-ROM, Humana Press, Totowa, N.J.).

### POLYPEPTIDES

[0140] The invention also relates to ADAM or Interactor proteins or polypeptides encoded by the nucleic acids described herein, see Table 2, or portions or variants thereof. The proteins and polypeptides of this invention can be isolated or recombinant. In a preferred embodiment, the proteins or portions thereof have at least one function characteristic of an ADAM or Interactor protein or polypeptide. These proteins are referred to as analogs, and the genes encoding them include, for example, naturally occurring ADAM or Interactor genes, variants (e.g., mutants) encoding those proteins or portions thereof. Such protein or polypeptide variants include mutants differing by the addition, deletion or substitution of one or more amino acid residues, or modified polypeptides in which one or more residues are modified (e.g., by phosphorylation, sulfation, acylation, etc.), and mutants comprising one or more modified residues. The variant can have “conservative” changes, wherein a substituted amino acid has similar structural or chemical properties, e.g., replacement of leucine with isoleucine. More infrequently, a variant can have “nonconservative” changes, e.g., replacement of a glycine with a tryptophan. Guidance in determining which amino acid residues can be substituted, inserted, or deleted without abolishing biological or immunological activity can be determined using computer programs well known in the art, for example, DNASTAR software (DNASTAR, Inc., Madison, Wis.).

[0141] As non-limiting examples, conservative substitutions in an ADAM or Interactor amino acid sequence can be made in accordance with the following table:

| Original | Conservative | Original | Conservative |
|---|---|---|---|
| Residue | Substitution(s) | Residue | Substitution(s) |
| Ala | Ser | Leu | Ile, Val |
| Arg | Lys | Lys | Arg, Gln, Glu |
| Asn | Gln, His | Met | Leu, Ile |
| Asp | Glu | Phe | Met, Leu, Tyr |
| Cys | Ser | Ser | Thr |
| Gln | Asn | Thr | Ser |
| Glu | Asp | Trp | Tyr |
| Gly | Pro | Tyr | Trp, Phe |
| His | Asn, Gln | Val | Ile, Leu |
| Ile | Leu, Val | | |

[0142] Substantial changes in function or immunogenicity can be made by selecting substitutions that are less conservative than those shown in the table, above. For example, non-conservative substitutions can be made which more significantly affect the structure of the polypeptide in the area of the alteration, for example, the alpha-helical, or beta-sheet structure; the charge or hydrophobicity of the molecule at the target site; or the bulk of the side chain. The substitutions which generally are expected to produce the greatest changes in the polypeptide's properties are those where 1) a hydrophilic residue, e.g., seryl or threonyl, is substituted for (or by) a hydrophobic residue, e.g., leucyl, isoleucyl, phenylalanyl, valyl, or alanyl; 2) a cysteine or proline is substituted for (or by) any other residue; 3) a residue having an electropositive side chain, e.g., lysyl, arginyl, or histidyl, is substituted for (or by) an electronegative residue, e.g., glutamyl or aspartyl; or 4) a residue having a bulky side chain, e.g., phenylalanine, is substituted for (or by) a residue that does not have a side chain, e.g., glycine.

[0143] In one embodiment, the percent amino acid sequence identity between an ADAM or Interactor polypeptide such as those shown in Table 2, and functional equivalents thereof is at least 50%. In a preferred embodiment, the percent amino acid sequence identity between such an ADAM or Interactor polypeptide and its functional equivalents is at least 65%. More preferably, the percent amino acid sequence identity of an ADAM or Interactor polypeptide and its functional equivalents is at least 75%, still more preferably, at least 80%, and even more preferably, at least 90%.

[0144] Percent sequence identity can be calculated using computer programs or direct sequence comparison. Preferred computer program methods to determine identity between two sequences include, but are not limited to, the GCG program package, FASTA, BLASTP, and TBLASTN (see, e.g., D. W. Mount, 2001, Bioinformatics: Sequence and Genome Analysis, Cold Spring Harbor Laboratory Press, Cold Spring Harbor, N.Y.). The BLASTP and TBLASTN programs are publicly available from NCBI and other sources. The well-known Smith Waterman algorithm may also be used to determine identity.

[0145] Exemplary parameters for amino acid sequence comparison include the following: 1) algorithm from Needleman and Wunsch, 1970, J Mol. Biol. 48:443-453; 2) BLOSSUM62 comparison matrix from Hentikoff and Hentikoff, 1992, Proc. Natl. Acad. Sci. USA 89:10915-10919; 3) gap penalty=12; and 4) gap length penalty=4. A program useful with these parameters is publicly available as the “gap” program (Genetics Computer Group, Madison, Wis.). The aforementioned parameters are the default parameters for polypeptide comparisons (with no penalty for end gaps).

[0146] Alternatively, polypeptide sequence identity can be calculated using the following equation: % identity=(the number of identical residues)/(alignment length in amino acid residues)*100. For this calculation, alignment length includes internal gaps but does not include terminal gaps.

[0147] In accordance with the present invention, polypeptide sequences may be identical to the sequence of any one of the sequences shown in Table 2, or may include up to a certain integer number of amino acid alterations. Polypeptide alterations are selected from the group consisting of at least one amino acid deletion, substitution, including conservative and non-conservative substitution, or insertion. Alterations may occur at the amino- or carboxy-terminal positions of the reference polypeptide sequence or anywhere between those terminal positions, interspersed either individually among the amino acids in the reference sequence or in one or more contiguous groups within the reference sequence.

[0148] In specific embodiments, a polypeptide variant may be encoded by an ADAM or Interactor nucleic acid comprising a SNP, allele, haplotype, or an alternate splice variant. For example, a polypeptide variant may be encoded by an ADAM or Interactor gene variant comprising a nucleotide sequence of any one of sequences shown in Tables 2-5 and 7, SEQ ID NOs. 1-9, and FIGS. 1-12.

[0149] The invention also relates to isolated, synthesized or recombinant portions or fragments of ADAM or Interactor protein or polypeptide as described herein. Polypeptide fragments (i.e., peptides) can be made which have full or partial function on their own, or which when mixed together (though fully, partially, or nonfunctional alone), spontaneously assemble with one or more other polypeptides to reconstitute a functional protein having at least one functional characteristic of an ADAM or Interactor protein of this invention. In addition, ADAM or Interactor polypeptide fragments may comprise, for example, one or more domains of the ADAM or Interactor polypeptide, disclosed herein.

[0150] Polypeptides according to the invention can comprise at least 5 contiguous amino acid residues; preferably the polypeptides comprise at least 12 contiguous residues; more preferably the polypeptides comprise at least 20 contiguous residues; and yet more preferably the polypeptides comprise at least 30 contiguous residues. Nucleic acids comprising protein-coding sequences can be used to direct the expression of asthma-associated polypeptides in intact cells or in cell-free translation systems. The coding sequence can be tailored, if desired, for more efficient expression in a given host organism, and can be used to synthesize oligonucleotides encoding the desired amino acid sequences. The resulting oligonucleotides can be inserted into an appropriate vector and expressed in a compatible host organism or translation system.

[0151] The polypeptides of the present invention, including function-conservative variants, may be isolated from wild-type or mutant cells (e.g., human cells or cell lines), from heterologous organisms or cells (e.g., bacteria, yeast, insect, plant, and mammalian cells), or from cell-free translation systems (e.g., wheat germ, microsomal membrane, or bacterial extracts) in which a protein-coding sequence has been introduced and expressed. Furthermore, the polypeptides may be part of recombinant fusion proteins. The polypeptides can also, advantageously, be made by synthetic chemistry. Polypeptides may be chemically synthesized by commercially available automated procedures, including, without limitation, exclusive solid phase synthesis, partial solid phase methods, fragment condensation or classical solution synthesis.

[0152] Methods for polypeptide purification are well-known in the art, including, without limitation, preparative disc-gel electrophoresis, isoelectric focusing, HPLC, reversed-phase HPLC, gel filtration, ion exchange and partition chromatography, and countercurrent distribution. For some purposes, it is preferable to produce the polypeptide in a recombinant system in which the protein contains an additional sequence (e.g., epitope or protein) tag that facilitates purification. Non-limiting examples of epitope tags include c-myc, haemagglutinin (HA), polyhistidine (6X-HIS) (SEQ ID NO:), GLU-GLU, and DYKDDDDK (SEQ ID NO:) (FLAG®) epitope tags. Non-limiting examples of protein tags include glutathione-S-transferase (GST), green fluorescent protein (GFP), and maltose binding protein (MBP).

[0153] In one approach, the coding sequence of a polypeptide or peptide can be cloned into a vector that creates a fusion with a sequence tag of interest. Suitable vectors include, without limitation, pRSET (Invitrogen Corp., San Diego, Calif.), PGEX (Amersham-Pharmacia Biotech, Inc., Piscataway, N.J.), pEGFP (CLONTECH Laboratories, Inc., Palo Alto, Calif.), and PMAL™ (New England BioLabs (NEB), Inc., Beverly, Mass.) plasmids. Following expression, the epitope, or protein tagged polypeptide or peptide can be purified from a crude lysate of the translation system or host cell by chromatography on an appropriate solid-phase matrix. In some cases, it may be preferable to remove the epitope or protein tag (i.e., via protease cleavage) following purification. As an alternative approach, antibodies produced against a disorder-associated protein or against peptides derived therefrom can be used as purification reagents. Other purification methods are also possible.

[0154] The present invention also encompasses modifications of an ADAM or Interactor polypeptides. The isolated polypeptides may be modified by, for example, phosphorylation, sulfation, acylation, or other protein modifications. They may also be modified with a label capable of providing a detectable signal, either directly or indirectly, including, but not limited to, radioisotopes and fluorescent compounds, as described in detail herein.

[0155] Both the naturally occurring and recombinant forms of the polypeptides of the invention can advantageously be used to screen compounds for binding activity. Many methods of screening for binding activity are known by those skilled in the art and may be used to practice the invention. Several methods of automated assays have been developed in recent years so as to permit screening of tens of thousands of compounds in a short period of time. Such high-throughput screening methods are particularly preferred. The use of high-throughput screening assays to test for inhibitors is greatly facilitated by the availability of large amounts of purified polypeptides, as provided by the invention. The polypeptides of the invention also find use as therapeutic agents as well as antigenic components to prepare antibodies.

[0156] The polypeptides of this invention find use as immunogenic components useful as antigens for preparing antibodies by standard methods. It is well known in the art that immunogenic epitopes generally contain at least 5 contiguous amino acid residues (Ohno et al., 1985, Proc. Natl. Acad. Sci. USA 82:2945). Therefore, the immunogenic components of this invention will typically comprise at least 5 contiguous amino acid residues of the sequence of the complete polypeptide chains. Preferably, they will contain at least 7, and most preferably at least 10 contiguous amino acid residues or more to ensure that they will be immunogenic. Whether a given component is immunogenic can readily be determined by routine experimentation. Such immunogenic components can be produced by proteolytic cleavage of larger polypeptides or by chemical synthesis or recombinant technology and are thus not limited by proteolytic cleavage sites. The present invention thus encompasses antibodies that specifically recognize asthma-associated immunogenic components.

### STRUCTURAL STUDIES

[0157] A purified ADAM or Interactor polypeptide, or portions or complexes thereof, can be analyzed by well-established methods (e.g., X-ray crystallography, NMR, CD, etc.) to determine the three-dimensional structure of the molecule. The three-dimensional structure, in turn, can be used to model intermolecular interactions. Exemplary methods for crystallization and X-ray crystallography are found in P. G. Jones, 1981, Chemistry in Britain, 17:222-225; C. Jones et al. (eds), Crystallographic Methods and Protocols, Humana Press, Totowa, N.J.; A. McPherson, 1982, Preparation and Analysis of Protein Crystals, John Wiley & Sons, New York, N.Y.; T. L. Blundell and L. N. Johnson, 1976, Protein Crystallography, Academic Press, Inc., New York, N.Y.; A. Holden and P. Singer, 1960, Crystals and Crystal Growing, Anchor Books-Doubleday, New York, N.Y.; R. A. Laudise, 1970, The Growth of Single Crystals, Solid State Physical Electronics Series, N. Holonyak, Jr., (ed), Prentice-Hall, Inc.; G. H. Stout and L. H. Jensen, 1989, X-ray Structure Determination: A Practical Guide, 2nd edition, John Wiliey & Sons, New York, N.Y.; Fundamentals of Analytical Chemistry, 3rd. edition, Saunders Golden Sunburst Series, Holt, Rinehart and Winston, Philadelphia, Pa., 1976; P. D. Boyle of the Department of Chemistry of North Carolina State University at http://laue.chem.ncsu.edu/web/GrowXtal.html; M. B. Berry, 1995, Protein Crystalization: Theory and Practice, Structure and Dynamics of E. coli Adenylate Kinase, Doctoral Thesis, Rice University, Houston Tex.; www.bioc.rice.edu/˜berry/papers/crystalization/crystalization.html.

[0158] For X-ray diffraction studies, single crystals can be grown to suitable size. Preferably, a crystal has a size of 0.2 to 0.4 mm in at least two of the three dimensions. Crystals can be formed in a solution comprising an ADAM or Interactor polypeptide (e.g., 1.5-200 mg/ml) and reagents that reduce the solubility to conditions close to spontaneous precipitation. Factors that affect the formation of polypeptide crystals include: 1) purity; 2) substrates or co-factors; 3) pH; 4) temperature; 5) polypeptide concentration; and 6) characteristics of the precipitant. Preferably, the ADAM or Interactor polypeptides are pure, i.e., free from contaminating components (at least 95% pure), and free from denatured ADAM or Interactor polypeptides. In particular, polypeptides can be purified by FPLC and HPLC techniques to assure homogeneity (see, Lin et al., 1992, J. Crystal. Growth. 122:242-245). Optionally, ADAM or Interactor polypeptide substrates or co-factors can be added to stabilize the quaternary structure of the protein and promote lattice packing.

[0159] Suitable precipitants for crystallization include, but are not limited to, salts (e.g., ammonium sulphate, potassium phosphate); polymers (e.g., polyethylene glycol (PEG) 6000); alcohols (e.g., ethanol); polyalcohols (e.g., 1-methyl-2,4 pentane diol (MPD)); organic solvents; sulfonic dyes; and deionized water. The ability of a salt to precipitate polypeptides can be generally described by the Hofmeister series: PO₄³⁻>HPO₄²⁻=SO₄²⁻>citrate>CH₃CO₂⁻>Cl⁻>Br⁻>NO₃⁻>ClO₄⁻>SCN⁻; and NH₄⁺>K⁺>Na⁺>Li⁺. Non-limiting examples of salt precipitants are shown below (see Berry, 1995).

| Precipitant | Maximum concentration |
|---|---|
| (NH₄⁺/Na⁺/Li⁺)₂ or | 4.0/1.5/2.1/2.5 M |
| Mg₂ + SO₄²⁻ | |
| NH₄⁺/Na⁺/K⁺ PO₄³⁻ | 3.0/4.0/4.0 M |
| NH₄⁺/K⁺/Na⁺ Li⁺ citrate | ˜1.8 M |
| NH₄⁺/K⁺/Na⁺/Li⁺ | ˜3.0 M |
| acetate | |
| NH₄⁺/K⁺/Na⁺/Li⁺ Cl⁻ | 5.2/9.8/4.2/5.4 M |
| NH₄⁺NO₃⁻ | ˜8.0 M |

[0160] High molecular weight polymers useful as precipitating agents include polyethylene glycol (PEG), dextran, polyvinyl alcohol, and polyvinyl pyrrolidone (A. Polson et al., 1964, Biochem. Biophys. Acta. 82:463-475). In general, polyethylene glycol (PEG) is the most effective for forming crystals. PEG compounds with molecular weights less than 1000 can be used at concentrations above 40% v/v. PEGs with molecular weights above 1000 can be used at concentration 5-50% w/v. Typically, PEG solutions are mixed with ˜0.1% sodium azide to prevent bacterial growth.

[0161] Typically, crystallization requires the addition of buffers and a specific salt content to maintain the proper pH and ionic strength for a protein's stability. Suitable additives include, but are not limited to sodium chloride (e.g., 50-500 mM as additive to PEG and MPD; 0.15-2 M as additive to PEG); potassium chloride (e.g., 0.05-2 M); lithium chloride (e.g., 0.05-2 M); sodium fluoride (e.g., 20-300 mM); ammonium sulfate (e.g., 20-300 mM); lithium sulfate (e.g., 0.05-2 M); sodium or ammonium thiocyanate (e.g., 50-500 mM); MPD (e.g., 0.5-50%); 1,6 hexane diol (e.g., 0.5-10%); 1,2,3 heptane triol (e.g., 0.5-15%); and benzamidine (e.g., 0.5-15%).

[0162] Detergents may be used to maintain protein solubility and prevent aggregation. Suitable detergents include, but are not limited to non-ionic detergents such as sugar derivatives, oligoethyleneglycol derivatives, dimethylamine-N-oxides, cholate derivatives, N-octyl hydroxyalkylsulphoxides, sulphobetains, and lipid-like detergents. Sugar-derived detergents include alkyl glucopyranosides (e.g., C8-GP, C9-GP), alkyl thio-glucopyranosides (e.g., C8-tGP), alkyl maltopyranosides (e.g., C10-M, C12-M; CYMAL-3, CYMAL-5, CYMAL-6), alkyl thio-maltopyranosides, alkyl galactopyranosides, alkyl sucroses (e.g., N-octanoylsucrose), and glucamides (e.g., HECAMEG, C-HEGA-10; MEGA-8). Oligoethyleneglycol-derived detergents include alkyl polyoxyethylenes (e.g., C8-E5, C8-En; C12-E8; C12-E9) and phenyl polyoxyethylenes (e.g., Triton X-100). Dimethylamine-N-oxide detergents include, e.g., C10-DAO; DDAO; LDAO. Cholate-derived detergents include, e.g., Deoxy-Big CHAP, digitonin. Lipid-like detergents include phosphocholine compounds. Suitable detergents further include zwitter-ionic detergents (e.g., ZWITTERGENT 3-10; ZWITTERGENT 3-12); and ionic detergents (e.g., SDS).

[0163] Crystallization of macromolecules has been performed at temperatures ranging from 60° C. to less than 0° C. However, most molecules can be crystallized at 4° C. or 22° C. Lower temperatures promote stabilization of polypeptides and inhibit bacterial growth. In general, polypeptides are more soluble in salt solutions at lower temperatures (e.g., 4° C.), but less soluble in PEG and MPD solutions at lower temperatures. To allow crystallization at 4° C. or 22° C., the precipitant or protein concentration can be increased or decreased as required. Heating, melting, and cooling of crystals or aggregates can be used to enlarge crystals. In addition, crystallization at both 4° C. and 22° C. can be assessed (A. McPherson, 1992, J. Cryst. Growth. 122:161-167; C. W. Carter, Jr. and C. W. Carter, 1979, J. Biol Chem. 254:12219-12223; T. Bergfors, 1993, Crystalization Lab Manual).

[0164] A crystallization protocol can be adapted to a particular polypeptide or peptide. In particular, the physical and chemical properties of the polypeptide can be considered (e.g., aggregation, stability, adherence to membranes or tubing, internal disulfide linkages, surface cysteines, chelating ions, etc.). For initial experiments, the standard set of crystalization reagents can be used (Hampton Research, Laguna Niguel, Calif.). In addition, the CRYSTOOL program can provide guidance in determining optimal crystallization conditions (Brent Segelke, 1995, Efficiency analysis of sampling protocols used in protein crystallization screening and crystal structure from two novel crystal forms of PLA2, Ph.D. Thesis, University of California, San Diego; http://www.ccp14.ac.uk/ccp/web-mirrors/llnlrupp/crystool/crystool.htm). Exemplary crystallization conditions are shown below (see Berry, 1995).

| | | Concentration | |
|---|---|---|---|
| | | of Major | Concentration |
| Major Precipitant | Additive | Precipitant | of Additive |
| (NH₄)₂SO₄ | PEG 400-2000, | 2.0-4.0 M | 6%-0.5% |
| | MPD, ethanol, | | |
| | or methanol | | |
| Na citrate | PEG 400-2000, | 1.4-1.8 M | 6%-0.5% |
| | MPD, ethanol, | | |
| | or methanol | | |
| PEG 1000-20000 | (NH 4)₂SO₄, NaCl, | 40-50% | 0.2-0.6 M |
| | or Na formate | | |

[0165] Robots can be used for automatic screening and optimization of crystallization conditions. For example, the IMPAX and Oryx systems can be used (Douglas Instruments, Ltd., East Garston, United Kingdom). The CRYSTOOL program (Segelke, supra) can be integrated with the robotics programming. In addition, the Xact program can be used to construct, maintain, and record the results of various crystallization experiments (see, e.g., D. E. Brodersen et al., 1999, J. Appl. Cryst. 32: 1012-1016; G. R. Andersen and J. Nyborg, 1996, J. Appl. Cryst. 29:236-240). The Xact program supports multiple users and organizes the results of crystallization experiments into hierarchies. Advantageously, Xact is compatible with both CRYSTOOL and Microsoft® Excel programs.

[0166] Four methods are commonly employed to crystallize macromolecules: vapor diffusion, free interface diffusion, batch, and dialysis. The vapor diffusion technique is typically performed by formulating a 1:1 mixture of a solution comprising the polypeptide of interest and a solution containing the precipitant at the final concentration that is to be achieved after vapor equilibration. The drop containing the 1:1 mixture of protein and precipitant is then suspended and sealed over the well solution, which contains the precipitant at the target concentration, as either a hanging or sitting drop. Vapor diffusion can be used to screen a large number of crystallization conditions or when small amounts of polypeptide are available. For screening, drop sizes of 1 to 2 μl can be used. Once preliminary crystallization conditions have been determined, drop sizes such as 10 μl can be used. Notably, results from hanging drops may be improved with agarose gels (see K. Provost and M.-C. Robert, 1991, J. Cryst. Growth. 110:258-264). Free interface diffusion is performed by layering of a low-density solution onto one of higher density, usually in the form of concentrated protein onto concentrated salt. Since the solute to be crystallized must be concentrated, this method typically requires relatively large amounts of protein. However, the method can be adapted to work with small amounts of protein. In a representative experiment, 2 to 5 μl of sample is pipetted into one end of a 20 μl microcapillary pipet. Next, 2 to 5 μl of precipitant is pipetted into the capillary without introducing an air bubble, and the ends of the pipet are sealed. With sufficient amounts of protein, this method can be used to obtain relatively large crystals (see, e.g., S. M. Althoff et al., 1988, J. Mol. Biol. 199:665-666).

[0167] The batch technique is performed by mixing concentrated polypeptide with concentrated precipitant to produce a final concentration that is supersaturated for the solute macromolecule. Notably, this method can employ relatively large amounts of solution (e.g., milliliter quantities), and can produce large crystals. For that reason, the batch technique is not recommended for screening initial crystallization conditions.

[0168] The dialysis technique is performed by diffusing precipitant molecules through a semipermeable membrane to slowly increase the concentration of the solute inside the membrane. Dialysis tubing can be used to dialyze milliliter quantities of sample, whereas dialysis buttons can be used to dialyze microliter quantities (e.g., 7-200 μl). Dialysis buttons may be constructed out of glass, perspex, or Teflon™ (see, e.g., Cambridge Repetition Engineers Ltd., Greens Road, Cambridge CB4 3EQ, UK; Hampton Research). Using this method, the precipitating solution can be varied by moving the entire dialysis button or sack into a different solution. In this way, polypeptides can be “reused” until the correct conditions for crystallization are found (see, e.g., C. W. Carter, Jr. et al., 1988, J. Cryst. Growth. 90:60-73). However, this method is not recommended for precipitants comprising concentrated PEG solutions.

[0169] Various strategies have been designed to screen crystallization conditions, including 1) pl screening; 2) grid screening; 3) factorials; 4) solubility assays; 5) perturbation; and 6) sparse matrices. In accordance with the pl screening method, the pl of a polypeptide is presumed to be its crystallization point. Screening at the pl can be performed by dialysis against low concentrations of buffer (less than 20 mM) at the appropriate pH, or by use of conventional precipitants.

[0170] The grid screening method can be performed on two-dimensional matrices. Typically, the precipitant concentration is plotted against pH. The optimal conditions can be determined for each axis, and then combined. At that point, additional factors can be tested (e.g., temperature, additives). This method works best with fast-forming crystals, and can be readily automated (see M. J. Cox and P. C. Weber, 1988, J. Cryst. Growth. 90:318-324). Grid screens are commercially available for popular precipitants such as ammonium sulphate, PEG 6000, MPD, PEG/LiCl, and NaCl (see, e.g., Hamilton Research).

[0171] The incomplete factorial method can be performed by 1) selecting a set of ˜20 conditions; 2) randomly assigning combinations of these conditions; 3) grading the success of the results of each experiment using an objective scale; and 4) statistically evaluating the effects of each of the conditions on crystal formation (see, e.g., C. W. Carter, Jr. et al., 1988, J. Cryst. Growth. 90:60-73). In particular, conditions such as pH, temperature, precipitating agent, and cations can be tested. Dialysis buttons are preferably used with this method. Typically, optimal conditions/combinations can be determined within 35 tests. Similar approaches, such as “footprinting” conditions, may also be employed (see, e.g., E. A. Stura et al., 1991, J. Cryst. Growth. 110:1-2).

[0172] The perturbation approach can be performed by altering crystallization conditions by introducing a series of additives designed to test the effects of altering the structure of bulk solvent and the solvent dielectric on crystal formation (see, e.g., Whitaker et al., 1995, Biochem. 34:8221-8226). Additives for increasing the solvent dialectric include, but are not limited to, NaCl, KCl, or LiCl (e.g., 200 mM); Na formate (e.g., 200 mM); Na₂HPO₄ or K₂HPO₄ (e.g., 200 mM); urea, triachloroacetate, guanidium HCl, or KSCN (e.g., 20-50 mM). A non-limiting list of additives for decreasing the solvent dialectric include methanol, ethanol, isopropanol, or tert-butanol (e.g., 1-5%); MPD (e.g., 1%); PEG 400, PEG 600, or PEG 1000 (e.g., 1-4%); PEG MME (monomethylether) 550, PEG MME 750, PEG MME 2000 (e.g., 1-4%).

[0173] As an alternative to the above-screening methods, the sparse matrix approach can be used (see, e.g., J. Jancarik and S.-H. J. Kim, 1991, Appl. Cryst. 24:409-411; A. McPherson, 1992, J. Cryst. Growth. 122:161-167; B. Cudney et al., 1994, Acta. Cryst. D50:414-423). Sparse matrix screens are commercially available (see, e.g., Hampton Research; Molecular Dimensions, Inc., Apopka, Fla.; Emerald Biostructures, Inc., Lemont, Ill.). Notably, data from Hampton Research sparse matrix screens can be stored and analyzed using ASPRUN software (Douglas Instruments).

[0174] Exemplary conditions for an initial screen are shown below (see Berry, 1995).

### CRYSTALIZATION CONDITIONS

[0175] Tray 1:

| | | | | | | Ammonium sulfate (wells 7-12) | | | | | |
|---|---|---|---|---|---|---|---|---|---|---|---|
| PEG 8000 (wells 1-6) | | | | | | | | | | | 1 |
| 20% | 20% | 20% | 35% | 35% | 35% | 2.0 M | 2.0 M | 2.0 M | 2 5 M | 2.5 M | 2.5 M |
| pH 5.0 | pH 7 0 | pH 8 6 | pH 5.0 | pH 7.0 | pH 8.6 | pH 5.0 | pH 7.0 | pH 8.8 | pH 5.0 | pH 7.0 | pH 8.8 |
| MPD (wells 13-16) | +TC,17/32 Na Citrate (wells 17-20) | | | | | | | Na/K Phosphate (wells 21-24) | | | |
| 13 | 14 | 15 | 16 | 17 | 18 | 19 | 20 | 21 | 22 | 23 | 24 |
| 30% | 30% | 50% | 50% | 1.3 M | 1.3 M | 1.5 M | 1.5 M | 2.0 M | 2.0 M | 2.5 M | 2.5 M |
| pH 5.8 | pH 7.6 | pH 5.8 | pH 7.6 | pH 5.8 | pH 7.5 | pH 5.8 | pH 7.5 | pH 6.0 | pH 7.4 | pH 6.0 | pH 7.4 |

[0176] Tray 2:

PEG 2000 MME/0.2 M Ammon. sulfate (wells 25-30)

| 25 | 26 | 27 | 28 | 29 | 30 |
|---|---|---|---|---|---|
| 25% | 25% | 25% | 40% | 40% | 40% |
| pH 5.5 | pH 7.0 | pH 8.5 | pH 5.5 | pH 7.0 | pH 8.5 |

Random for wells 31 to 48

[0177] The initial screen can be used with hanging or sitting drops. To conserve the sample, tray 2 can be set up several weeks following tray 1. Wells 31-48 of tray 2 can comprise a random set of solutions. Alternatively, solutions can be formulated using sparse methods. Preferably, test solutions cover a broad range of precipitants, additives, and pH (especially pH 5.0-9.0).

[0178] Seeding can be used to trigger nucleation and crystal growth (Stura and Wilson, 1990, J. Cryst. Growth. 110:270-282; C. Thaller et al., 1981, J. Mol. Biol. 147:465-469; A. McPherson and P. Schlichta, 1988, J. Cryst. Growth. 90:47-50). In general, seeding can performed by transferring crystal seeds into a polypeptide solution to allow polypeptide molecules to deposit on the surface of the seeds and produce crystals. Two seeding methods can be used: microseeding and macroseeding. For microseeding, a crystal can be ground into tiny pieces and transferred into the protein solution. Alternatively, seeds can be transferred by adding 1-2 μl of the seed solution directly to the equilibrated protein solution. In another approach, seeds can be transferred by dipping a hair in the seed solution and then streaking the hair across the surface of the drop (streak seeding; see Stura and Wilson, supra). For macroseeding, an intact crystal can be transferred into the protein solution (see, e.g., C. Thaller et al., 1981, J. Mol. Biol. 147:465-469). Preferably, the surface of the crystal seed is washed to regenerate the growing surface prior to being transferred. Optimally, the protein solution for crystallization is close to saturation and the crystal seed is not completely dissolved upon transfer.

### ANTIBODIES

[0179] Another aspect of the invention pertains to antibodies directed to ADAM or Interactor polypeptides, or portions or variants thereof. The invention provides polyclonal and monoclonal antibodies that bind ADAM or Interactor polypeptides or peptides. The antibodies may be elicited in an animal host (e.g., rabbit, goat, mouse, or other non-human mammal) by immunization with disorder-associated immunogenic components. Antibodies may also be elicited by in vitro immunization (sensitization) of immune cells. The immunogenic components used to elicit the production of antibodies may be isolated from cells or chemically synthesized. The antibodies may also be produced in recombinant systems programmed with appropriate antibody-encoding DNA. Alternatively, the antibodies may be constructed by biochemical reconstitution of purified heavy and light chains. The antibodies include hybrid antibodies, chimeric antibodies, and univalent antibodies. Also included are Fab fragments, including Fab¹ and Fab(ab)² fragments of antibodies.

[0180] In accordance with the present invention, antibodies are directed to ADAM or Interactor genes (e.g., such as the sequences shown in Tables 2-5 and 7, SEQ ID NOs. 1-9, and FIGS. 1-12), or variants, or portions thereof. For example, antibodies can be produced to bind to an ADAM or Interactor gene polypeptide encoded by an alternate splice variant comprising the nucleotide sequences shown in FIGS. 1-12. As another example, antibodies can be produced to bind to an ADAM or Interactor polypeptide variant encoded by a nucleic acid containing one or more ADAM or Interactor gene SNPs as set forth in SEQ ID. NOs.: 1-9. Such antibodies can be used as diagnostic or therapeutic reagents.

[0181] An isolated ADAM or Interactor gene polypeptide, or variant, or portion thereof, can be used as an immunogen to generate antibodies using standard techniques for polyclonal and monoclonal antibody preparation. A full-length ADAM or Interactor polypeptide can be used or, alternatively, the invention provides antigenic peptide portions of ADAM or Interactor polypeptides for use as immunogens. The antigenic peptide of an ADAM or Interactor comprises at least 5 contiguous amino acid residues of the amino acid sequence shown in any one of column 5 of Table 2, or a variant thereof, and encompasses an epitope of an ADAM or Interactor polypeptide such that an antibody raised against the peptide forms a specific immune complex with an ADAM or Interactor amino acid sequence.

[0182] An appropriate immunogenic preparation can contain, for example, recombinantly produced ADAM or Interactor polypeptide or a chemically synthesized ADAM or Interactor polypeptide, or portions thereof. The preparation can further include an adjuvant, such as Freund's complete or incomplete adjuvant, or similar immunostimulatory agent. A number of adjuvants are known and used by those skilled in the art. Non-limiting examples of suitable adjuvants include incomplete Freund's adjuvant, mineral gels such as alum, aluminum phosphate, aluminum hydroxide, aluminum silica, and surface-active substances such as lysolecithin, pluronic polyols, polyanions, peptides, oil emulsions, keyhole limpet hemocyanin, and dinitrophenol. Further examples of adjuvants include N-acetyl-muramyl-L-threonyl-D-isoglutamine (thr-MDP), N-acetyl-nor-muramyl-L-alanyl-D-isoglutamine (CGP 11637, referred to as nor-MDP), N-acetylmuramyl-Lalanyl-D-isoglutaminyl-L-alanine-2-(1′-2′-dipalmitoyl-sn-glycero-3 hydroxyphosphoryloxy)-ethylamine (CGP 19835A, referred to as MTP-PE), and RIBI, which contains three components extracted from bacteria, monophosphoryl lipid A, trehalose dimycolate and cell wall skeleton (MPL+TDM+CWS) in a 2% squalene/Tween 80 emulsion. A particularly useful adjuvant comprises 5% (wt/vol) squalene, 2.5% Pluronic L121 polymer and 0.2% polysorbate in phosphate buffered saline (Kwak et al., 1992, New Eng. J. Med. 327:1209-1215). Preferred adjuvants include complete BCG, Detox, (RIBI, Immunochem Research Inc.), ISCOMS, and aluminum hydroxide adjuvant (Superphos, Biosector). The effectiveness of an adjuvant may be determined by measuring the amount of antibodies directed against the immunogenic peptide.

[0183] Polyclonal antibodies to ADAM or Interactor polypeptides can be prepared as described above by immunizing a suitable subject with an ADAM or Interactor gene immunogen. The antibody titer in the immunized subject can be monitored over time by standard techniques, such as with an enzyme linked immunosorbent assay (ELISA) using immobilized ADAM or Interactor polypeptide or peptide. If desired, the antibody molecules can be isolated from the mammal (e.g., from the blood) and further purified by well-known techniques, such as protein A chromatography to obtain the IgG fraction.

[0184] At an appropriate time after immunization, e.g., when the antibody titers are highest, antibody-producing cells can be obtained from the subject and used to prepare monoclonal antibodies by standard techniques, such as the hybridoma technique (see Kohler and Milstein, 1975, Nature 256:495-497; Brown et al., 1981, J. Immunol. 127:539-46; Brown et al., 1980, J. Biol. Chem. 255:4980-83; Yeh et al., 1976, PNAS 76:2927-31; and Yeh et al., 1982, Int J. Cancer 29:269-75), the human B cell hybridoma technique (Kozbor et al., 1983, Immunol. Today 4:72), the EBV-hybridoma technique (Cole et al., 1985, Monoclonal Antibodies and Cancer Therapy, Alan R. Liss, Inc., pp. 77-96) or trioma techniques.

[0185] The technology for producing hybridomas is well-known (see generally R. H. Kenneth, 1980, Monoclonal Antibodies: A New Dimension In Biological Analyses, Plenum Publishing Corp., New York, N.Y.; E. A. Lerner, 1981, Yale J. Biol. Med., 54:387-402; M. L. Gefter et al., 1977, Somatic Cell Genet. 3:231-36). In general, an immortal cell line (typically a myeloma) is fused to lymphocytes (typically splenocytes) from a mammal immunized with an ADAM or Interactor immunogen as described above, and the culture supernatants of the resulting hybridoma cells are screened to identify a hybridoma producing a monoclonal antibody that binds ADAM or Interactor polypeptides or peptides.

[0186] Any of the many well known protocols used for fusing lymphocytes and immortalized cell lines can be applied for the purpose of generating a monoclonal antibody to an ADAM or Interactor polypeptide (see, e.g., G. Galfre et al., 1977, Nature 266:55052; Gefter et al., 1977; Lerner, 1981; Kenneth, 1980). Moreover, the ordinarily skilled worker will appreciate that there are many variations of such methods. Typically, the immortal cell line (e.g., a myeloma cell line) is derived from the same mammalian species as the lymphocytes. For example, murine hybridomas can be made by fusing lymphocytes from a mouse immunized with an immunogenic preparation of the present invention with an immortalized mouse cell line. Preferred immortal cell lines are mouse myeloma cell lines that are sensitive to culture medium containing hypoxanthine, aminopterin, and thymidine (HAT medium). Any of a number of myeloma cell lines can be used as a fusion partner according to standard techniques, e.g., the P3-NS1/1-Ag4-1, P3-x63-Ag8.653, or Sp2/O-Ag14 myeloma lines. These myeloma lines are available from ATCC (American Type Culture Collection, Manassas, Va.). Typically, HAT-sensitive mouse myeloma cells are fused to mouse splenocytes using polyethylene glycol (PEG). Hybridoma cells resulting from the fusion arc then selected using HAT medium, which kills unfused and unproductively fused myeloma cells (unfused splenocytes die after several days because they are not transformed). Hybridoma cells producing a monoclonal antibody of the invention are detected by screening the hybridoma culture supernatants for antibodies that bind ADAM or Interactor polypeptides or peptides, e.g., using a standard ELISA assay.

[0187] Alternative to preparing monoclonal antibody-secreting hybridomas, a monoclonal antibody can be identified and isolated by screening a recombinant combinatorial immunoglobulin library (e.g., an antibody phage display library) with the corresponding ADAM or Interactor polypeptide to thereby isolate immunoglobulin library members that bind the polypeptide. Kits for generating and screening phage display libraries are commercially available (e.g., the Pharmacia Recombinant Phage Antibody System, Catalog No. 27-9400-01; and the Stratagene SurfZAP™ Phage Display Kit, Catalog No. 240612).

[0188] Additionally, examples of methods and reagents particularly amenable for use in generating and screening antibody display library can be found in, for example, Ladner et al. U.S. Pat. No. 5,223,409; Kang et al. PCT International Publication No. WO 92/18619; Dower et al. PCT International Publication No. WO 91/17271; Winter et al. PCT International Publication WO 92/20791; Markland et al. PCT International Publication No. WO 92/15679; Breitling et al. PCT International Publication WO 93/01288; McCafferty et al. PCT International Publication No. WO 92/01047; Garrard et al. PCT International Publication No. WO 92/09690; Ladner et al. PCT International Publication No. WO 90/02809; Fuchs et al., 1991, Bio/Technology 9:1370-1372; Hay et al., 1992, Hum. Antibod. Hybridomas 3:81-85; Huse et al., 1989, Science 246:1275-1281; Griffiths et al., 1993, EMBO J 12:725-734; Hawkins et al., 1992, J. Mol. Biol. 226:889-896; Clarkson et al., 1991, Nature 352:624-628; Gram et al., 1992, PNAS 89:3576-3580; Garrad et al., 1991, Bio/Technology 9:1373-1377; Hoogenboom et al., 1991, Nuc. Acid Res. 19:4133-4137; Barbas et al., 1991, PNAS 88:7978-7982; and McCafferty et al., 1990, Nature 348:552-55.

[0189] Additionally, recombinant antibodies to an ADAM or Interactor polypeptide, such as chimeric and humanized monoclonal antibodies, comprising both human and non-human portions, can be made using standard recombinant DNA techniques. Such chimeric and humanized monoclonal antibodies can be produced by recombinant DNA techniques known in the art, for example using methods described in Robinson et al. International Application No. PCT/US86/02269; Akira, et al. European Patent Application 184,187; Taniguchi, M., European Patent Application 171,496; Morrison et al. European Patent Application 173,494; Neuberger et al. PCT International Publication No. WO 86/01533; Cabilly et al. U.S. Pat. No. 4,816,567; Cabilly et al. European Patent Application 125,023; Better et al., 1988, Science 240:1041-1043; Liu et al., 1987, PNAS 84:3439-3443; Liu et al., 1987, J. Immunol. 139:3521-3526; Sun et al., 1987, PNAS 84:214-218; Nishimura et al., 1987, Canc. Res. 47:999-1005; Wood et al., 1985, Nature 314:446-449; and Shaw et al., 1988, J. Natl. Cancer Inst. 80:1553-1559; S. L. Morrison, 1985, Science 229:1202-1207; Oi et al., 1986, BioTechniques 4:214; Winter U.S. Pat. No. 5,225,539; Jones et al., 1986, Nature 321:552-525; Verhoeyan et al., 1988, Science 239:1534; and Bcidler et al., 1988, J. Immunol. 141:4053-4060.

[0190] An antibody against an ADAM or Interactor polypeptide (e.g., monoclonal antibody) can be used to isolate the corresponding polypeptide by standard techniques, such as affinity chromatography or immunoprecipitation. For example, antibodies can facilitate the purification of a natural ADAM or Interactor gene polypeptide from cells and of a recombinantly produced ADAM or Interactor polypeptide or peptide expressed in host cells. In addition, an antibody that binds to an ADAM or Interactor polypeptide can be used to detect the corresponding protein (e.g., in a cellular lysate or cell supernatant) in order to evaluate the abundance and pattern of expression of the protein. Such antibodies can also be used diagnostically to monitor ADAM or Interactor protein levels in tissue as part of a clinical testing procedure, e.g., to, for example, determine the efficacy of a given treatment regimen as described in detail herein. In addition, antibodies to an ADAM or Interactor polypeptide can be used as therapeutics for the treatment of diseases related to asthma, atopy, inflammatory bowel disease and obesity.

### LIGANDS

[0191] The ADAM or Interactor polypeptides, polynucleotides, variants, or fragments or portions thereof (e.g. Tables 2-5 and 7, SEQ ID NOs. 1-9, and FIGS. 1-12), can be used to screen for ligands (e.g., agonists, antagonists, or inhibitors) that modulate the levels or activity of the ADAM or Interactor polypeptide. In addition, these ADAM or Interactor molecules can be used to identify endogenous ligands that bind to ADAM or Interactor polypeptides or polynucleotides in the cell. In one aspect of the present invention, the full-length ADAM or Interactor polypeptide is used to identify ligands. Alternatively, variants or portions of an ADAM or Interactor polypeptide are used. Such portions may comprise, for example, one or more domains of the ADAM or Interactor polypeptide (e.g., intracellular, extracellular, SH3, fibronectin III repeat, cysteine-rich, and Ser/Thr-XXX-Val domains) disclosed herein. Of particular interest are screening assays that identify agents that have relatively low levels of toxicity in human cells. A wide variety of assays may be used for this purpose, including in vitro protein-protein binding assays, electrophoretic mobility shift assays, immunoassays, and the like.

[0192] Ligands that bind to the ADAM or Interactor polypeptides or polynucleotides of the invention are potentially useful in diagnostic applications and pharmaceutical compositions, as described in detail herein. Ligands may encompass numerous chemical classes, though typically they are organic molecules, e.g., small molecules. Preferably, small molecules have a molecular weight of less than 5000 daltons, more preferably, small molecules have a molecular weight of more than 50 and less than 2,500 daltons. Such molecules can comprise functional groups necessary for structural interaction with proteins, particularly hydrogen bonding, and typically include at least an amine, carbonyl, hydroxyl or carboxyl group, preferably at least two of the functional chemical groups. Useful molecules often comprise cyclical carbon or heterocyclic structures or aromatic or polyaromatic structures substituted with one or more of the above functional groups. Such molecules can also comprise biomolecules including peptides, saccharides, fatty acids, steroids, purines, pyrimidines, derivatives, structural analogs, or combinations thereof.

[0193] Ligands may include, for example, 1) peptides such as soluble peptides, including Ig-tailed fusion peptides and members of random peptide libraries (see, e.g., Lam et al., 1991, Nature 354:82-84; Houghten et al., 1991, Nature 354:84-86) and combinatorial chemistry-derived molecular libraries made of D- or L-configuration amino acids; 2) phosphopeptides (e.g., members of random and partially degenerate, directed phosphopeptide libraries, see, e.g., Songyang et al, 1993, Cell 72:767-778); 3) antibodies (e.g., polyclonal, monoclonal, humanized, anti-idiotypic, chimeric, and single chain antibodies as well as Fab, F(ab′)₂, Fab expression library fragments, and epitope-binding fragments of antibodies); and 4) small organic and inorganic molecules.

[0194] Test agents useful for identifying ADAM or Interactor ligands can be obtained from a wide variety of sources including libraries of synthetic or natural compounds. Synthetic compound libraries are commercially available from, for example, Maybridge Chemical Co. (Trevillet, Cornwall, UK), Comgenex (Princeton, N.J.), Brandon Associates (Merrimack, N.H.), and Microsource (New Milford, Conn.). A rare chemical library is available from Aldrich Chemical Company, Inc. (Milwaukee, Wis.). Natural compound libraries comprising bacterial, fungal, plant or animal extracts are available from, for example, Pan Laboratories (Bothell, WA). In addition, numerous means are available for random and directed synthesis of a wide variety of organic compounds and biomolecules, including expression of randomized oligonucleotides.

[0195] Alternatively, libraries of natural compounds in the form of bacterial, fungal, plant and animal extracts can be readily produced. Methods for the synthesis of molecular libraries are readily available (see, e.g., DeWiff et al., 1993, Proc. Nat. Acad. Sci. USA 90:6909; Erb et al., 1994, Proc. Natl. Acad. Sci. USA 91:11422; Zuckermann et al., 1994, J. Med. Chem. 37:2678; Cho et al., 1993, Science 261:1303; Carell et al., 1994, Angew. Chem. Int. Ed. Engl. 33:2059; Carell et al., 1994, Angew. Chem. Int. Ed. Engl. 33:2061; and in Gallop et al., 1994, J. Med. Chem. 37:1233). In addition, natural or synthetic compound libraries and compounds can be readily modified through conventional chemical, physical and biochemical means (see, e.g., Blondelle et al., 1996, Trends in Biotech. 14:60), and may be used to produce combinatorial libraries. In another approach, previously identified pharmacological agents can be subjected to directed or random chemical modifications, such as acylation, alkylation, esterification, amidification, and the analogs can be screened for ADAM or Interactor gene-modulating activity.

[0196] Numerous methods for producing combinatorial libraries are known in the art, including those involving biological libraries; spatially addressable parallel solid phase or solution phase libraries; synthetic library methods requiring deconvolution; the ‘one-bead one-compound’ library method; and synthetic library methods using affinity chromatography selection. The biological library approach is limited to polypeptide libraries, while the other four approaches are applicable to polypeptide, non-peptide oligomer, or small molecule libraries of compounds (K. S. Lam, 1997, Anticancer Drug Des. 12:145).

[0197] Non-limiting examples of small molecules, small molecule libraries, combinatorial libraries, and screening methods are described in B. Seligmann, 1995, “Synthesis, Screening, Identification of Positive Compounds and Optimization of Leads from Combinatorial Libraries: Validation of Success” p. 69-70. Symposium: Exploiting Molecular Diversity: Small Molecule Libraries for Drug Discovery, La Jolla, Calif., Jan. 23-25, 1995 (conference summary available from Wendy Warr & Associates, 6 Berwick Court, Cheshire, UK CW4 7HZ); E. Martin et al., 1995, J. Med. Chem. 38:1431-1436; E. Martin et al., 1995, “Measuring diversity: Experimental design of combinatorial libraries for drug discovery” Abstract, ACS Meeting, Anaheim, Calif., COMP 32; and E. Martin, 1995, “Measuring Chemical Diversity: Random Screening or Rationale Library Design” p. 27-30, Symposium: Exploiting Molecular Diversity: Small Molecule Libraries for Drug Discovery, La Jolla, Calif. Jan. 23-25, 1995 (conference summary available from Wendy Warr & Associates, 6 Berwick Court, Cheshire, UK CW4 7HZ).

[0198] Libraries may be screened in solution (e.g., Houghten, 1992, Biotechniques 13:412-421), or on beads (Lam, 1991, Nature 354:82-84), chips (Fodor, 1993, Nature 364:555-556), bacteria or spores (Ladner U.S. Pat. No. 5,223,409), plasmids (Cull et al., 1992, Proc. Natl. Acad. Sci. USA 89:1865-1869), or on phage (Scott and Smith, 1990, Science 249:386-390; Devlin, 1990, Science 249:404-406; Cwirla et al., 1990, Proc. Natl. Acad. Sci. USA 97:6378-6382; Felici, 1991, J. Mol. Biol. 222:301-310; Ladner, supra).

[0199] Where the screening assay is a binding assay, an ADAM or Interactor polypeptide, polynucleotide, analog, or fragment thereof, may be joined to a label, where the label can directly or indirectly provide a detectable signal. Various labels include radioisotopes, fluorescers, chemiluminescers, enzymes, specific binding molecules, particles, e.g., magnetic particles, and the like. Specific binding molecules include pairs, such as biotin and streptavidin, digoxin and antidigoxin, etc. For the specific binding members, the complementary member would normally be labeled with a molecule that provides for detection, in accordance with known procedures.

[0200] A variety of other reagents may be included in the screening assay. These include reagents like salts, neutral proteins, e.g., albumin, detergents, etc., that are used to facilitate optimal protein-protein binding or reduce non-specific or background interactions. Reagents that improve the efficiency of the assay, such as protease inhibitors, nuclease inhibitors, anti-microbial agents, etc., may be used. The components are added in any order that produces the requisite binding. Incubations are performed at any temperature that facilitates optimal activity, typically between 40 and 40° C. Incubation periods are selected for optimum activity, but may also be optimized to facilitate rapid high-throughput screening. Normally, between 0.1 and 1 hr will be sufficient. In general, a plurality of assay mixtures is run in parallel with different agent concentrations to obtain a differential response to these concentrations. Typically, one of these concentrations serves as a negative control, i.e., at zero concentration or below the level of detection.

[0201] To perform cell-free ligand screening assays, it may be desirable to immobilize either an ADAM or Interactor polypeptide, polynucleotide, or fragment to a surface to facilitate identification of ligands that bind to these molecules, as well as to accommodate automation of the assay. For example, a fusion protein comprising an ADAM or Interactor polypeptide and an affinity tag can be produced. In one embodiment, a glutathione-S-transferase/phosphodiesterase fusion protein comprising an ADAM or Interactor polypeptide is adsorbed onto glutathione sepharose beads (Sigma Chemical, St. Louis, Mo.) or glutathione-derivatized microtiter plates. Cell lysates (e.g., containing ³⁵S-labeled polypeptides) are added to the coated beads under conditions to allow complex formation (e.g., at physiological conditions for salt and pH). Following incubation, the coated beads are washed to remove any unbound polypeptides, and the amount of immobilized radiolabel is determined. Alternatively, the complex is dissociated and the radiolabel present in the supernatant is determined. In another approach, the beads are analyzed by SDS-PAGE to identify the bound polypeptides.

[0202] Ligand-binding assays can be used to identify agonist or antagonists that alter the function or levels of an ADAM or Interactor polypeptide. Such assays are designed to detect the interaction of test agents (e.g., small molecules) with ADAM or Interactor polypeptides, polynucleotides, analogs, or fragments or portions thereof. Interactions may be detected by direct measurement of binding. Alternatively, interactions may be detected by indirect indicators of binding, such as stabilization/destabilization of protein structure, or activation/inhibition of biological function. Non-limiting examples of useful ligand-binding assays are detailed below.

[0203] Ligands that bind to ADAM or Interactor polypeptides, polynucleotides, analogs, or fragments or portions thereof, can be identified using real-time Bimolecular Interaction Analysis (BIA; Sjolander et al., 1991, Anal. Chem. 63:2338-2345; Szabo et al., 1995, Curr. Opin. Struct. Biol. 5:699-705). BIA-based technology (e.g., BIAcore™; LKB Pharmacia, Sweden) allows study of biospecific interactions in real time, without labeling. In BIA, changes in the optical phenomenon surface plasmon resonance (SPR) is used determine real-time interactions of biological molecules.

[0204] Ligands can also be identified by scintillation proximity assays (SPA, described in U.S. Pat. No. 4,568,649). In a modification of this assay that is currently undergoing development, chaperoning are used to distinguish folded and unfolded proteins. A tagged protein is attached to SPA beads, and test agents are added. The bead is then subjected to mild denaturing conditions (such as, e.g., heat, exposure to SDS, etc.) and a purified labeled chaperonin is added. If a test agent binds to a target, the labeled chaperonin will not bind; conversely, if no test agent binds, the protein will undergo some degree of denaturation and the chaperonin will bind.

[0205] Ligands can also be identified using a binding assay based on mitochondrial targeting signals (Hurt et al., 1985, EMBO J. 4:2061-2068; Eilers and Schatz, 1986, Nature 322:228-231). In a mitochondrial import assay, expression vectors are constructed in which nucleic acids encoding particular target proteins are inserted downstream of sequences encoding mitochondrial import signals. The chimeric proteins are synthesized and tested for their ability to be imported into isolated mitochondria in the absence and presence of test compounds. A test compound that binds to the target protein should inhibit its uptake into isolated mitochondria in vitro.

[0206] The ligand-binding assay described in Fodor et al., 1991, Science 251:767-773, which involves testing the binding affinity of test compounds for a plurality of defined polymers synthesized on a solid substrate, can also be used.

[0207] Ligands that bind to ADAM or Interactor polypeptides or peptides can be identified using two-hybrid assays (see, e.g., U.S. Pat. No. 5,283,317; Zervos et al., 1993, Cell 72:223-232; Madura et al., 1993, J. Biol. Chem. 268:12046-12054; Bartel et al., 1993, Biotechniques 14:920-924; Iwabuchi et al., 1993, Oncogene 8:1693-1696; and Brent WO 94/10300). The two-hybrid system relies on the reconstitution of transcription activation activity by association of the DNA-binding and transcription activation domains of a transcriptional activator through protein-protein interaction. The yeast GAL4 transcriptional activator may be used in this way, although other transcription factors have been used and are well known in the art. To carryout the two-hybrid assay, the GAL4 DNA-binding domain, and the GAL4 transcription activation domain are expressed, separately, as fusions to potential interacting polypeptides.

[0208] In one embodiment, the “bait” protein comprises an ADAM or Interactor polypeptide fused to the GAL4 DNA-binding domain. The “fish” protein comprises, for example, a human cDNA library encoded polypeptide fused to the GAL4 transcription activation domain. If the two, coexpressed fusion proteins interact in the nucleus of a host cell, a reporter gene (e.g., LacZ) is activated to produce a detectable phenotype. The host cells that show two-hybrid interactions can be used to isolate the containing plasmids containing the cDNA library sequences. These plasmids can be analyzed to determine the nucleic acid sequence and predicted polypeptide sequence of the candidate ligand. Alternatively, methods such as the three-hybrid (Licitra et al., 1996, Proc. Nat. Acad. Sci. USA 93:12817-12821), and reverse two-hybrid (Vidal et al., 1996, Proc. Natl. Acad. Sci. USA 93:10315-10320) systems may be used. Commercially available two-hybrid systems such as the CLONTECH Matchmaker™ systems and protocols (CLONTECH Laboratories, Inc., Palo Alto, Calif.) may be also be used (see also, A. R. Mendelsohn et al., 1994, Curr. Op. Biotech. 5:482; E. M. Phizicky et al., 1995, Microbiological Rev. 59:94; M. Yang et al., 1995, Nucleic Acids Res. 23:1152; S. Fields et al., 1994, Trends Genet. 10:286; and U.S. Pat. No. 6,283,173 and 5,468,614).

[0209] Several methods of automated assays have been developed in recent years so as to permit screening of tens of thousands of test agents in a short period of time. High-throughput screening methods are particularly preferred for use with the present invention. The ligand-binding assays described herein can be adapted for high-throughput screens, or alternative screens may be employed. For example, continuous format high throughput screens (CF-HTS) using at least one porous matrix allows the researcher to test large numbers of test agents for a wide range of biological or biochemical activity (see U.S. Pat. No. 5,976,813 to Beutel et al.). Moreover, CF-HTS can be used to perform multi-step assays.

### DIAGNOSTICS

[0210] As discussed herein, ADAM or Interactor genes are associated with various diseases and disorders, including but not limited to, asthma, atopy, obesity, and inflammatory bowel disease. The present invention therefore provides nucleic acids and antibodies that can be useful in diagnosing individuals with disorders associated with aberrant ADAM or Interactor gene expression or mutated ADAM or Interactor genes. In particular, nucleic acids comprising ADAM or Interactor SNP alleles and haplotypes can be used to identify chromosomal abnormalities linked to these diseases. Additionally, antibodies directed against the amino acid variants encoded by the ADAM or Interactor SNPs can be used to identify disease-associated polypeptides. Examples 5 and 6 herein further illustrate the use of ADAM and Interactor genes for identifying polymorphisms.

[0211] Antibody-based diagnostic methods: In a further embodiment of the present invention, antibodies which specifically bind to an ADAM or Interactor polypeptide encoded by the nucleic acids shown in Tables 2-5 and 7, SEQ ID NOs. 1-9, and FIGS. 1-12, may be used for the diagnosis of conditions or diseases characterized by underexpression or overexpression of the ADAM or Interactor polynucleotide or polypeptide, or in assays to monitor patients being treated with an ADAM or Interactor polypeptide, polynucleotide, or antibody, or an ADAM or Interactor agonist, antagonist, or inhibitor.

[0212] The antibodies useful for diagnostic purposes may be prepared in the same manner as those for use in therapeutic methods, described herein. Antibodies may be raised to a full-length ADAM or Interactor polypeptide sequence. Alternatively, the antibodies may be raised to portions or variants of the ADAM or Interactor polypeptide. Such variants include polypeptides encoded by the disclosed ADAM or Interactor SNPs or alternate splice variants. In one aspect of the invention, antibodies are prepared to bind to an ADAM or Interactor polypeptide fragment comprising one or more domains of the ADAM or Interactor polypeptide (e.g., transmembrane, intracellular, extracellular, SH3, fibronectin III repeat, cysteine-rich, and Ser/Thr-XXX-Val domains), as described in detail herein.

[0213] Diagnostic assays for an ADAM or Interactor polypeptide include methods that utilize the antibody and a label to detect the protein in biological samples (e.g., human body fluids, cells, tissues, or extracts of cells or tissues). The antibodies may be used with or without modification, and may be labeled by joining them, either covalently or non-covalently, with a reporter molecule. A wide variety of reporter molecules that are known in the art may be used, several of which are described herein.

[0214] The invention provides methods for detecting disease-associated antigenic components in a biological sample, which methods comprise the steps of: 1) contacting a sample suspected to contain a disease-associated antigenic component with an antibody specific for an disease-associated antigen, extracellular or intracellular, under conditions in which an antigen-antibody complex can form between the antibody and disease-associated antigenic components in the sample; and 2) detecting any antigen-antibody complex formed in step (1) using any suitable means known in the art, wherein the detection of a complex indicates the presence of disease-associated antigenic components in the sample. It will be understood that assays that utilize antibodies directed against altered ADAM or Interactor amino acid sequences (i.e., epitopes encoded by SNPs, modifications, mutations, or variants) are within the scope of the invention.

[0215] Many immunoassay formats are known in the art, and the particular format used is determined by the desired application. An immunoassay can use, for example, a monoclonal antibody directed against a single disease-associated epitope, a combination of monoclonal antibodies directed against different epitopes of a single disease-associated antigenic component, monoclonal antibodies directed towards epitopes of different disease-associated antigens, polyclonal antibodies directed towards the same disease-associated antigen, or polyclonal antibodies directed towards different disease-associated antigens. Protocols can also, for example, use solid supports, or may involve immunoprecipitation.

[0216] In accordance with the present invention, “competitive” (U.S. Pat. Nos. 3,654,090 and 3,850,752), “sandwich” (U.S. Pat. No. 4,016,043), and “double antibody,” or “DASP” assays may be used. Several procedures for measuring the amount of an ADAM or Interactor polypeptide in a sample (e.g., ELISA, RIA, and FACS) are known in the art and provide a basis for diagnosing altered or abnormal levels of ADAM or Interactor polypeptide expression. Normal or standard values for an ADAM or Interactor polypeptide expression are established by incubating biological samples taken from normal subjects, preferably human, with antibody to an ADAM or Interactor polypeptide under conditions suitable for complex formation. The amount of standard complex formation may be quantified by various methods; photometric means are preferred. Levels of the ADAM or Interactor polypeptide expressed in the subject sample, negative control (normal) sample, and positive control (disease) sample are compared with the standard values. Deviation between standard and subject values establishes the parameters for diagnosing disease.

[0217] Typically, immunoassays use either a labeled antibody or a labeled antigenic component (i.e., to compete with the antigen in the sample for binding to the antibody). A number of fluorescent materials are known and can be utilized as labels for antibodies or polypeptides. These include, for example, Cy3, Cy5, GFP (e.g., EGFP, DsRed, dEFP, etc. (CLONTECH, Palo Alto, Calif.)), Alexa, BODIPY, fluorescein (e.g., FluorX, DTAF, and FITC), rhodamine (e.g., TRITC), auramine, Texas Red, AMCA blue, and Lucifer Yellow. Antibodies or polypeptides can also be labeled with a radioactive element or with an enzyme. Preferred isotopes include ³H, ¹⁴C, 32 P, ³⁵S, ³⁶Cl, ⁵¹Cr, ⁵⁷CO, ⁵⁸CO, ⁵⁹Fe, ⁹⁰Y, ¹²⁵I, ¹³¹I, and ¹⁸⁶Re.

[0218] Preferred enzymes include peroxidase, β-glucuronidase, β-D-glucosidase, β-D-galactosidase, urease, glucose oxidase plus peroxidase, and alkaline phosphatase (see, e.g., U.S. Pat. Nos. 3,654,090; 3,850,752 and 4,016,043). Enzymes can be conjugated by reaction with bridging molecules such as carbodiimides, diisocyanates, glutaraldehyde, and the like. Enzyme labels can be detected visually, or measured by calorimetric, spectrophotometric, fluorospectrophotometric, amperometric, or gasometric techniques. Other labeling systems, such as avidin/biotin, Tyramide Signal Amplification (TSA™), are known in the art, and are commercially available (see, e.g., ABC kit, Vector Laboratories, Inc., Burlingame, Calif.; NEN® Life Science Products, Inc., Boston, Mass.).

[0219] Kits suitable for antibody-based diagnostic applications typically include one or more of the following components:

[0220] (1) Antibodies: The antibodies may be pre-labeled; alternatively, the antibody may be unlabeled and the ingredients for labeling may be included in the kit in separate containers, or a secondary, labeled antibody is provided; and

[0221] (2) Reaction components: The kit may also contain other suitably packaged reagents and materials needed for the particular immunoassay protocol, including solid-phase matrices, if applicable, and standards.

[0222] The kits referred to above may include instructions for conducting the test. Furthermore, in preferred embodiments, the diagnostic kits are adaptable to high-throughput or automated operation.

[0223] Nucleic-acid-based diagnostic methods: The invention provides methods for detecting altered levels or sequences of ADAM or Interactor nucleic acids (e.g., such as the sequences shown in Tables 2-5 and 7, SEQ ID NOs. 1-9, and FIGS. 1-12) in a sample, such as in a biological sample, comprising the steps of: 1) contacting a sample suspected to contain a disease-associated nucleic acid with one or more disease-associated nucleic acid probes under conditions in which hybrids can form between any of the probes and disease-associated nucleic acid in the sample; and 2) detecting any hybrids formed in step (1) using any suitable means known in the art, wherein the detection of hybrids indicates the presence of the disease-associated nucleic acid in the sample. Exemplary methods are described in the Examples, herein below. To detect disease-associated nucleic acids present in low levels in biological samples, it may be necessary to amplify the disease-associated sequences or the hybridization signal as part of the diagnostic assay. Techniques for amplification are known to those of skill in the art.

[0224] The presence of an ADAM or Interactor polynucleotide sequences can be detected by DNA-DNA or DNA-RNA hybridization, or by amplification using probes or primers comprising at least a portion of an ADAM or Interactor polynucleotide, or a sequence complementary thereto. In particular, nucleic acid amplification-based assays can use ADAM or Interactor oligonucleotides or oligomers to detect transformants containing ADAM or Interactor DNA or RNA. Preferably, ADAM or Interactor nucleic acids useful as probes in diagnostic methods include oligonucleotides at least 15 contiguous nucleotides in length, more preferably at least 20 contiguous nucleotides in length, and most preferably at least 25-55 contiguous nucleotides in length, that hybridize specifically with ADAM or Interactor nucleic acids. As non-limiting examples, probes or primers useful for diagnostics may comprise any of the ADAM or Interactor DNA nucleotide sequences shown in Tables 3 and 4.

[0225] Several methods can be used to produce specific probes for ADAM or Interactor polynucleotides. For example, labeled probes can be produced by oligo-labeling, nick translation, end-labeling, or PCR amplification using a labeled nucleotide. Alternatively, ADAM or Interactor polynucleotide sequences, or any portions or fragments thereof, may be cloned into a vector for the production of an mRNA probe. Such vectors are known in the art, are commercially available, and may be used to synthesize RNA probes in vitro by addition of an appropriate RNA polymerase, such as T7, T3, or SP(6) end labeled nucleotides. These procedures may be conducted using a variety of commercially available kits (e.g., from Amersham-Pharmacia; Promega Corp.; and U.S. Biochemical Corp., Cleveland, Ohio). Suitable reporter molecules or labels which may be used include radionucleotides, enzymes, fluorescent, chemiluminescent, or chromogenic agents, as well as substrates, cofactors, inhibitors, magnetic particles, and the like.

[0226] A sample to be analyzed, such as, for example, a tissue sample (e.g., hair or buccal cavity) or body fluid sample (e.g., blood or saliva), may be contacted directly with the nucleic acid probes. Alternatively, the sample may be treated to extract the nucleic acids contained therein. It will be understood that the particular method used to extract DNA will depend on the nature of the biological sample. The resulting nucleic acid from the sample may be subjected to gel electrophoresis or other size separation techniques, or, the nucleic acid sample may be immobilized on an appropriate solid matrix without size separation.

[0227] Kits suitable for nucleic acid-based diagnostic applications typically include the following components:

[0228] (1)Probe DNA: The probe DNA may be prelabeled; alternatively, the probe DNA may be unlabeled and the ingredients for labeling may be included in the kit in separate containers; and

[0229] (2)Hybridization reagents: The kit may also contain other suitably packaged reagents and materials needed for the particular hybridization protocol, including solid-phase matrices, if applicable, and standards.

[0230] In cases where a disease condition is suspected to involve an alteration of an ADAM or Interactor nucleotide sequence, specific oligonucleotides may be constructed and used to assess the level of disease mRNA in cells affected or other tissue affected by the disease. For example, PCR can be used to test whether a person has a disease-related polymorphism (i.e., mutation). Specific methods of polymorphism identification are described herein, but are not intended to limit the present invention. The detection of polymorphisms in DNA sequences can be accomplished by a variety of methods including, but not limited to, RFLP detection based on allele-specific restriction-endonuclease cleavage (Kan and Dozy, 1978, Lancet ii:910-912), hybridization with allele-specific oligonucleotide probes (Wallace et al., 1978, Nucl Acids Res. 6:3543-3557), including immobilized oligonucleotides (Saiki et al., 1969, Proc. Natl. Acad. Sci. USA 86:6230-6234) or oligonucleotide arrays (Maskos and Southern, 1993, Nucl. Acids Res. 21:2269-2270), allele-specific PCR (Newton et al., 1989, Nucl. Acids Res. 17:2503-2516), mismatch-repair detection (MRD) (Faham and Cox, 1995, Genome Res. 5:474-482), binding of MutS protein (Wagner et al., 1995, Nucl. Acids Res. 23:3944-3948), denaturing-gradient gel electrophoresis (DGGE) (Fisher and Lerman et al., 1983, Proc. Natl. Acad. Sci. USA. 80:1579-1583), single-strand-conformation-polymorphism detection (Orita et al., 1983, Genomics 5:874-879), RNAase cleavage at mismatched base-pairs (Myers et al., 1985, Science 230:1242), chemical (Cotton et al., 1988, Proc. Natl. Acad. Sci. USA 8:4397-4401) or enzymatic (Youil et al., 1995, Proc. Natl. Acad. Sci. USA 92:87-91) cleavage of heteroduplex DNA, methods based on allele specific primer extension (Syvanen et al., 1990, Genomics 8:684-692), genetic bit analysis (GBA) Nikiforov et al., 1994, Nucl. Acids 22:4167-4175), the oligonucleotide-ligation assay (OLA) (Landegren et al., 1988, Science 241:1077), the allele-specific ligation chain reaction (LCR) (Barrany, 1991, Proc. Natl. Acad. Sci. USA 88:189-193), gap-LCR (Abravaya et al., 1995, Nucl. Acids Res. 23:675-682), radioactive or fluorescent DNA sequencing using standard procedures well known in the art, and peptide nucleic acid (PNA) assays (Orum et al., 1993, Nucl. Acids Res. 21:5332-5356).

[0231] For PCR analysis, ADAM or Interactor oligonucleotides may be chemically synthesized, generated enzymatically, or produced from a recombinant source. Oligomers will preferably comprise two nucleotide sequences, one with a sense orientation (5′→3′) and another with an antisense orientation (3′→5′), employed under optimized conditions for identification of a specific gene or condition. The same two oligomers, nested sets of oligomers, or even a degenerate pool of oligomers may be employed under less stringent conditions for detection and quantification of closely related DNA or RNA sequences.

[0232] In accordance with PCR analysis, two oligonucleotides are synthesized by standard methods or are obtained from a commercial supplier of custom-made oligonucleotides. The length and base composition are determined by standard criteria using the Oligo 4.0 primer Picking program (W. Rychlik, 1992; available from Molecular Biology Insights, Inc., Cascade, Colo.). One of the oligonucleotides is designed so that it will hybridize only to the disease gene DNA under the PCR conditions used. The other oligonucleotide is designed to hybridize a segment of genomic DNA such that amplification of DNA using these oligonucleotide primers produces a conveniently identified DNA fragment. Samples may be obtained from hair follicles, whole blood, or the buccal cavity. The DNA fragment generated by this procedure is sequenced by standard techniques.

[0233] In one particular aspect, ADAM or Interactor oligonucleotides can be used to perform Genetic Bit Analysis (GBA) of ADAM or Interactor genes in accordance with published methods (T. T. Nikiforov et al., 1994, Nucleic Acids Res. 22(20):4167-75; T. T. Nikiforov T T et al., 1994, PCR Methods Appl. 3(5):285-91). In PCR-based GBA, specific fragments of genomic DNA containing the polymorphic site(s) are first amplified by PCR using one unmodified and one phosphorothioate-modified primer. The double-stranded PCR product is rendered single-stranded and then hybridized to immobilized oligonucleotide primer in wells of a multi-well plate. The primer is designed to anneal immediately adjacent to the polymorphic site of interest. The 3′ end of the primer is extended using a mixture of individually labeled dideoxynucleoside triphosphates. The label on the extended base is then determined. Preferably, GBA is performed using semi-automated ELISA or biochip formats (see, e.g., S. R. Head et al., 1997, Nucleic Acids Res. 25(24):5065-71; T. T. Nikiforov et al., 1994, Nucleic Acids Res. 22(20):4167-75).

[0234] Other amplification techniques besides PCR may be used as alternatives, such as ligation-mediated PCR or techniques involving Q-beta replicase (Cahill et al., 1991, Clin. Chem., 37(9):1482-5). Products of amplification can be detected by agarose gel electrophoresis, quantitative hybridization, or equivalent techniques for nucleic acid detection known to one skilled in the art of molecular biology (Sambrook et al., 1989). Other alterations in the disease gene may be diagnosed by the same type of amplification-detection procedures, by using oligonucleotides designed to contain and specifically identify those alterations.

[0235] In accordance with the present invention, ADAM or Interactor polynucleotides may also be used to detect and quantify levels of ADAM or Interactor mRNA in biological samples in which altered expression of ADAM or Interactor polynucleotide may be correlated with disease. These diagnostic assays may be used to distinguish between the absence, presence, increase, and decrease of ADAM or Interactor mRNA levels, and to monitor regulation of ADAM or Interactor polynucleotide levels during therapeutic treatment or intervention. For example, ADAM or Interactor polynucleotide sequences, or fragments, or complementary sequences thereof, can be used in Southern or Northern analysis, dot blot, or other membrane-based technologies; in PCR technologies; or in dip stick, pin, ELISA or biochip assays utilizing fluids or tissues from patient biopsies to detect the status of, e.g., levels or overexpression of ADAM or Interactor genes, or to detect altered ADAM or Interactor gene expression. Such qualitative or quantitative methods are well known in the art (G. H. Keller and M. M. Manak, 1993, DNA Probes, 2^{nd} Ed, Macmillan Publishers Ltd., England; D. W. Dieffenbach and G. S. Dveksler, 1995, PCR Primer: A Laboratory Manual, Cold Spring Harbor Press, Plainview, N.Y.; B. D. Hames and S. J. Higgins, 1985, Gene Probes 1, 2, IRL Press at Oxford University Press, Oxford, England).

[0236] Methods suitable for quantifying the expression of ADAM or Interactor genes include radiolabeling or biotinylating nucleotides, co-amplification of a control nucleic acid, and standard curves onto which the experimental results are interpolated (P. C. Melby et al., 1993, J. Immunol. Methods 159:235-244; and C. Duplaa et al., 1993, Anal. Biochem. 212(1):229-36.). The speed of quantifying multiple samples may be accelerated by running the assay in an ELISA format where the oligomer of interest is presented in various dilutions and a spectrophotometric or colorimetric response gives rapid quantification.

[0237] In accordance with these methods, the specificity of the probe, i.e., whether it is made from a highly specific region (e.g., at least 8 to 10 or 12 or 15 contiguous nucleotides in the 5′ regulatory region), or a less specific region (e.g., especially in the 3′ coding region), and the stringency of the hybridization or amplification (e.g., high, moderate, or low) will determine whether the probe identifies naturally occurring sequences encoding the ADAM or Interactor polypeptide, or alleles, SNPs, SNP alleles and haplotypes, mutants, or related sequences.

[0238] In a particular aspect, an ADAM or Interactor nucleic acid sequence (e.g., such as shown in Tables 2-5 and 7, SEQ ID NOs. 1-9, and FIGS. 1-12), or a sequence complementary thereto, or fragment thereof, may be useful in assays that detect ADAM or Interactor-related diseases such as asthma. An ADAM or Interactor polynucleotide can be labeled by standard methods, and added to a biological sample from a subject under conditions suitable for the formation of hybridization complexes. After a suitable incubation period, the sample can be washed and the signal is quantified and compared with a standard value. If the amount of signal in the test sample is significantly altered from that of a comparable negative control (normal) sample, the altered levels of an ADAM or Interactor nucleotide sequence can be correlated with the presence of the associated disease. Such assays may also be used to evaluate the efficacy of a particular prophylactic or therapeutic regimen in animal studies, in clinical trials, or for an individual patient.

[0239] To provide a basis for the diagnosis of a disease associated with altered expression of a ADAM or Interactor gene, a normal or standard profile for expression is established. This may be accomplished by incubating biological samples taken from normal subjects, either animal or human, with a sequence complementary to the ADAM or Interactor polynucleotide, or a fragment thereof, under conditions suitable for hybridization or amplification. Standard hybridization may be quantified by comparing the values obtained from normal subjects with those from an experiment where a known amount of a substantially purified polynucleotide is used. Standard values obtained from normal samples may be compared with values obtained from samples from patients who are symptomatic for the disease. Deviation between standard and subject (patient) values is used to establish the presence of the condition.

[0240] Once the disease is diagnosed and a treatment protocol is initiated, hybridization assays may be repeated on a regular basis to evaluate whether the level of expression in the patient begins to approximate that which is observed in a normal individual. The results obtained from successive assays may be used to show the efficacy of treatment over a period ranging from several days to months.

[0241] With respect to diseases such as asthma, the presence of an abnormal amount of an ADAM or Interactor transcript in a biological sample (e.g., body fluid, cells, tissues, or cell or tissue extracts) from an individual may indicate a predisposition for the development of the disease, or may provide a means for detecting the disease prior to the appearance of actual clinical symptoms. A more definitive diagnosis of this type may allow health professionals to employ preventative measures or aggressive treatment earlier, thereby preventing the development or further progression of the disease.

[0242] Microarrays: In another embodiment of the present invention, oligonucleotides, or longer fragments derived from an ADAM or Interactor polynucleotide sequence described herein may be used as targets in a microarray (e.g., biochip) system. The microarray can be used to monitor the expression level of large numbers of genes simultaneously (to produce a transcript image), and to identify genetic variants, mutations, and polymorphisms. This information may be used to determine gene function, to understand the genetic basis of a disease, to diagnose disease, and to develop and monitor the activities of therapeutic or prophylactic agents. Preparation and use of microarrays have been described in WO 95/11995 to Chee et al.; D. J. Lockhart et al., 1996, Nature Biotechnology 14:1675-1680; M. Schena et al., 1996, Proc. Natl. Acad. Sci. USA 93:10614-10619; U.S. Pat. No. 6,015,702 to P. Lal et al; J. Worley et al., 2000, Microarray Biochip Technology, M. Schena, ed., Biotechniques Book, Natick, Mass., pp. 65-86; Y. H. Rogers et al., 1999, Anal. Biochem. 266(1):23-30; S.R. Head et al., 1999, Mol. Cell. Probes. 13(2):81-7; S. J. Watson et al., 2000, Biol. Psychiatry 48(12): 1147-56.

[0243] In one application of the present invention, microarrays containing arrays of ADAM or Interactor polynucleotide sequences can be used to measure the expression levels of ADAM or Interactor nucleic acids in an individual. In particular, to diagnose an individual with an ADAM or Interactor -related condition or disease, a sample from a human or animal (containing nucleic acids, e.g., mRNA) can be used as a probe on a biochip containing an array of ADAM or Interactor polynucleotides (e.g., DNA) in decreasing concentrations (e.g., 1 ng, 0.1 ng, 0.01 ng, etc.). The test sample can be compared to samples from diseased and normal samples. Biochips can also be used to identify ADAM or Interactor mutations or polymorphisms in a population, including but not limited to, deletions, insertions, and mismatches. For example, mutations can be identified by: 1) placing ADAM or Interactor polynucleotides of this invention onto a biochip; 2) taking a test sample (containing, e.g., mRNA) and adding the sample to the biochip; 3) determining if the test samples hybridize to the 12q23-qter polynucleotides attached to the chip under various hybridization conditions (see, e.g., V. R. Chechetkin et al., 2000, J. Biomol. Struct. Dyn. 18(1):83-101). Alternatively microarray sequencing can be performed (see, e.g., E. P. Diamandis, 2000, Clin. Chem. 46(10):1523-5).

[0244] Chromosome mapping: In another application of this invention, ADAM or Interactor nucleic acid sequences (e.g. such as those shown in Tables 2-5 and 7, SEQ ID NOs. 1-9, and FIGS. 1-12), or complementary sequences, or fragments thereof, can be used as probes to map genomic sequences. The sequences may be mapped to a particular chromosome, to a specific region of a chromosome, or to human artificial chromosome constructions (HACs), yeast artificial chromosomes (YACs), bacterial artificial chromosomes (BACs), bacterial PI constructions, or single chromosome cDNA libraries (see, e.g., C. M. Price, 1993, Blood Rev., 7:127-134; B. J. Trask, 1991, Trends Genet 7:149-154).

[0245] In another of its aspects, the invention relates to a diagnostic kit for detecting an ADAM or Interactor polynucleotide or polypeptide as it relates to a disease or susceptibility to a disease, particularly asthma. Also related is a diagnostic kit that can be used to detect or assess asthma conditions. Such kits comprise one or more of the following:

[0246] (a) an ADAM or Interactor polynucleotide, preferably the nucleotide sequence of any of the sequences shown in Tables 2-5 and 7, SEQ ID NOs. 1-9, and FIGS. 1-12, or a fragment thereof; or

[0247] (b) a nucleotide sequence complementary to that of (a); or

[0248] (c) an ADAM or Interactor polypeptide, preferably the polypeptide of any of the sequences shown in Tables 2-5 and 7, SEQ ID NOs. 1-9, and FIGS. 1-12, or a fragment thereof; or

[0249] (d) an antibody to an ADAM or Interactor polypeptide, preferably to the polypeptide of any one of the sequences shown in Tables 2-7, SEQ ID NOs: 1-9, and FIGS. 1-12, or an antibody bindable fragment thereof. It will be appreciated that in any such kits, (a), (b), (c), or (d) may comprise a substantial component and that instructions for use can be included. The kits may also contain peripheral reagents such as buffers, stabilizers, etc.

[0250] The present invention also includes a test kit for genetic screening that can be utilized to identify mutations in ADAM or Interactor genes. By identifying patients with mutated ADAM or Interactor DNA and comparing the mutation to a database that contains known mutations in ADAM or Interactor and a particular condition or disease, identification and confirmation of, a particular condition or disease can be made. Accordingly, such a kit would comprise a PCR-based test that would involve transcribing the patients mRNA with a specific primer, and amplifying the resulting cDNA using another set of primers. The amplified product would be detectable by gel electrophoresis and could be compared with known standards for ADAM or Interactor genes. Preferably, this kit would utilize a patient's blood, serum, or saliva sample, and the DNA would be extracted using standard techniques. Primers flanking a known mutation would then be used to amplify a fragment of an ADAM or Interactor gene. The amplified piece would then be sequenced to determine the presence of a mutation.

[0251] Genomic Screening: Polymorphic genetic markers linked to a ADAM or Interactor genes can be used to predict susceptibility to the diseases genetically linked to that chromosomal region. Similarly, the identification of polymorphic genetic markers within ADAM or Interactor genes will allow the identification of specific allelic variants that are in linkage disequilibrium with other genetic lesions that affect one of the disease states discussed herein including respiratory disorders, obesity, and inflammatory bowel disease. SSCP (see below) allows the identification of polymorphisms within the genomic and coding region of the disclosed genes.

[0252] The present invention provides sequences for primers that can be used identify exons that contain SNPs, as well as sequences for primers that can be used to identify the sequence changes of the SNPs. In particular, Tables 3 and 4 show polymorphic primers, probes, or genetic markers within the ADAM or Interactor genes, which can be used to identify specific allelic variants that are in linkage disequilibrium with other genetic lesions that affect one of the disease states discussed herein, including asthma, atopy, obesity, and inflammatory bowel disease. Such markers can be used in conjunction with SSCP to identify polymorphisms within the genomic and coding region of the disclosed gene. In particular, Table 7 describes the specific methods used to identify the SNPs described herein.

[0253] This information can be used to identify additional SNPs and SNP alleles and haplotypes in accordance with the methods disclosed herein. Suitable methods for genomic screening have also been described by, e.g., Sheffield et al., 1995, Genet. 4:1837-1844; LeBlanc-Straceski et al., 1994, Genomics 19:341-9; Chen et al., 1995, Genomics 25:1-8. In employing these methods, the disclosed reagents can be used to predict the risk for disease (e.g., respiratory disorders, obesity, and inflammatory bowel disease) in a population or individual.

### THERAPEUTICS

[0254] As discussed herein, ADAM or Interactor genes are associated with various diseases and disorders, including but not limited to, asthma, atopy, obesity, and inflammatory bowel disease (B. Wallaert et al., 1995, J. Exp. Med. 182:1897-1904). The present invention therefore provides compositions (e.g., pharmaceutical compositions) comprising ADAM and Interactor nucleic acids, polypeptides, antibodies, ligands, or variants, portions, or fragments thereof that can be useful in treating individuals with these disorders. Also provided are methods employing ADAM or Interactor nucleic acids, polypeptides, antibodies, ligands, or variants, portions, or fragments thereof to identify drug candidates that can be used to prevent, treat, or ameliorate such disorders.

[0255] Drug screening and design: The present invention provides methods of screening for drugs using an ADAM or Interactor polypeptide, or portion thereof, in competitive binding assays, according to methods well-known in the art. For example, competitive drug screening assays can be employed using neutralizing antibodies capable of specifically binding an ADAM or Interactor polypeptide compete with a test compound for binding to the ADAM or Interactor polypeptide or fragments thereof.

[0256] The present invention further provides methods of rational drug design employing an ADAM or Interactor polypeptide, antibody, or portion or functional equivalent thereof. The goal of rational drug design is to produce structural analogs of biologically active polypeptides of interest or of small molecules with which they interact (e.g., agonists, antagonists, or inhibitors). In turn, these analogs can be used to fashion drugs which are, for example, more active or stable forms of the polypeptide, or which, e.g., enhance or interfere with the function of the polypeptide in vivo (see, e.g., Hodgson, 1991, Bio/Technology, 9:19-21). An example of rational drug design is the development of HIV protease inhibitors (Erickson et al., 1990, Science, 249:527-533).

[0257] In one approach, one first determines the three-dimensional structure of a protein of interest or, for example, of an ADAM or Interactor polypeptide or ligand complex, by x-ray crystallography, computer modeling, or a combination thereof. Useful information regarding the structure of a polypeptide can also be gained by computer modeling based on the structure of homologous proteins. In addition, ADAM or Interactor polypeptides, or portions thereof, can be analyzed by an alanine scan (Wells, 1991, Methods in Enzymol., 202:390-411). In this technique, each amino acid residue in an ADAM or Interactor polypeptide is replaced by alanine, and its effect on the activity of the polypeptide is determined.

[0258] In another approach, an antibody specific to an ADAM or Interactor polypeptide can be isolated, selected by a functional assay, and then analyzed to solve its crystal structure. In principle, this approach can yield a pharmacore upon which subsequent drug design can be based. Alternatively, it is possible to bypass protein crystallography altogether by generating anti-idiotypic antibodies (anti-ids) to a functional, pharmacologically active antibody. As a mirror image of a mirror image, the binding site of the anti-ids is predicted to be an analog of the corresponding ADAM or Interactor polypeptide. The anti-id can then be used to identify and isolate peptides from banks of chemically or biologically produced banks of peptides. Selected peptides can subsequently be used as pharmacores.

[0259] Non-limiting examples of methods and computer tools for drug design are described in R. Cramer et al., 1974, J. Med. Chem. 17:533; H. Kubinyi (ed) 1993, 3D QSAR in Drug Design, Theory, Methods, and Applications, ESCOM, Leiden, Holland; P. Dean (ed) 1995, Molecular Similarity in Drug Design, K. Kim “Comparative molecular field analysis (ComFA)” p. 291-324, Chapman & Hill, London, UK; Y. et al., 1993, J. Comp.—Aid. Mol. Des. 7:83-102; G. Lauri and P. A. Bartlett, 1994, J. Comp.—Aid. Mol. Des. 8:51-66; P. J. Gane and P. M. Dean, 2000, Curr. Opin. Struct. Biol. 10(4):401-4; H. O. Kim and M. Kahn, 2000, Comb. Chem. High Throughput Screen. 3(3):167-83; G. K. Farber, 1999, Pharmacol Ther. 84(3):327-32; and H. van de Waterbeemd (ed) 1996, Structure-Property Correlations in Drug Research, Academic Press, San Diego, Calif.

[0260] In another aspect of the present invention, cells and animals that carry an ADAM or Interactor gene or an analog thereof can be used as model systems to study and test for substances that have potential as therapeutic agents. After a test agent is administered to animals or applied to the cells, the phenotype of the animals/cells can be determined.

[0261] In accordance with these methods, one may design drugs that result in, for example, altered ADAM or Interactor polypeptide activity or stability. Such drugs may act as inhibitors, agonists, or antagonists of an ADAM or Interactor polypeptide. By virtue of the availability of cloned ADAM or Interactor gene sequences, sufficient amounts of the ADAM or Interactor polypeptide may be produced to perform such analytical studies as x-ray crystallography. In addition, the knowledge of the ADAM or Interactor polypeptide sequence will guide those employing computer-modeling techniques in place of, or in addition to x-ray crystallography.

[0262] Pharmaceutical compositions: The present invention contemplates compositions comprising a ADAM or Interactor polynucleotides, polypeptide, antibody, ligand (e.g., agonist, antagonist, or inhibitor), or fragments, variants, or analogs thereof, and a physiologically acceptable carrier, excipient, or diluent as described in detail herein. The present invention further contemplates pharmaceutical compositions useful in practicing the therapeutic methods of this invention. Preferably, a pharmaceutical composition includes, in admixture, a pharmaceutically acceptable excipient (carrier) and one or more of an ADAM or Interactor polypeptide, polynucleotide, ligand, antibody, or fragment, portion, or variant thereof, as described herein, as an active ingredient. The preparation of pharmaceutical compositions that contain ADAM or Interactor molecules as active ingredients is well understood in the art. Typically, such compositions are prepared as injectables, either as liquid solutions or suspensions, however, solid forms suitable for solution in, or suspension in, liquid prior to injection can also be prepared. The preparation can also be emulsified. The active therapeutic ingredient is often mixed with excipients that are pharmaceutically acceptable and compatible with the active ingredient. Suitable excipients are, for example, water, saline, dextrose, glycerol, ethanol, or the like and combinations thereof. In addition, if desired, the composition can contain minor amounts of auxiliary substances such as wetting or emulsifying agents, pH-buffering agents, which enhance the effectiveness of the active ingredient.

[0263] An ADAM or Interactor polypeptide, polynucleotide, ligand, antibody, or fragment, portion, or variant thereof can be formulated into the pharmaceutical composition as neutralized physiologically acceptable salt forms. Suitable salts include the acid addition salts (i.e., formed with the free amino groups of the polypeptide or antibody molecule) and which are formed with inorganic acids such as, for example, hydrochloric or phosphoric acids, or such organic acids as acetic, oxalic, tartaric, mandelic, and the like. Salts formed from the free carboxyl groups can also be derived from inorganic bases such as, for example, sodium, potassium, ammonium, calcium, or ferric hydroxides, and such organic bases as isopropylamine, trimethylamine, 2-ethylamino ethanol, histidine, procaine, and the like.

[0264] The pharmaceutical compositions can be administered systemically by oral or parenteral routes. Non-limiting parenteral routes of administration include subcutaneous, intramuscular, intraperitoneal, intravenous, transdermal, inhalation, intranasal, intra-arterial, intrathecal, enteral, sublingual, or rectal. Intravenous administration, for example, can be performed by injection of a unit dose. The term “unit dose” when used in reference to a pharmaceutical composition of the present invention refers to physically discrete units suitable as unitary dosage for humans, each unit containing a predetermined quantity of active material calculated to produce the desired therapeutic effect in association with the required diluent; i.e., carrier, or vehicle.

[0265] In one particular embodiment of the present invention, the disclosed pharmaceutical compositions are administered via mucoactive aerosol therapy (see, e.g., M. Fuloria and B. K. Rubin, 2000, Respir. Care 45:868-873; I. Gonda, 2000, J. Pharm. Sci. 89:940-945; R. Dhand, 2000, Curr. Opin. Pulm. Med. 6(1):59-70; B. K. Rubin, 2000, Respir. Care 45(6):684-94; S. Suarez and A. J. Hickey, 2000, Respir. Care. 45(6):652-66).

[0266] Pharmaceutical compositions are administered in a manner compatible with the dosage formulation, and in a therapeutically effective amount. The quantity to be administered depends on the subject to be treated, capacity of the subject's immune system to utilize the active ingredient, and degree of modulation of ADAM or Interactor gene activity desired. Precise amounts of active ingredient required to be administered depend on the judgment of the practitioner and are specific for each individual. However, suitable dosages may range from about 0.1 to 20, preferably about 0.5 to about 10, and more preferably one to several, milligrams of active ingredient per kilogram body weight of individual per day and depend on the route of administration. Suitable regimes for initial administration and booster shots are also variable, but are typified by an initial administration followed by repeated doses at one or more hour intervals by a subsequent injection or other administration. Alternatively, continuous intravenous infusions sufficient to maintain concentrations of 10 nM to 10 μM in the blood are contemplated. An exemplary pharmaceutical formulation comprises: ADAM or Interactor antagonist or inhibitor (5.0 mg/ml); sodium bisulfite USP (3.2 mg/ml); disodium edetate USP (0.1 mg/ml); and water for injection q.s.a.d. (1.0 ml). As used herein, “pg” means picogram, “ng” means nanogram, “μg” means microgram, “mg” means milligram, “μl” means microliter, “ml” means milliliter, and “l” means L.

[0267] For further guidance in preparing pharmaceutical formulations, see, e.g., Gilman et al. (eds), 1990, Goodman and Gilman's: The Pharmacological Basis of Therapeutics, 8th ed., Pergamon Press; and Remington's Pharmaceutical Sciences, 17th ed., 1990, Mack Publishing Co., Easton, Pa.; Avis et al. (eds), 1993, Pharmaceutical Dosage Forms: Parenteral Medications, Dekker, New York; Lieberman et al. (eds), 1990, Pharmaceutical Dosage Forms: Disperse Systems, Dekker, New York.

[0268] In yet another aspect of this invention, antibodies that specifically react with an ADAM or Interactor polypeptide or peptides derived therefrom can be used as therapeutics. In particular, such antibodies can be used to block the activity of an ADAM or Interactor polypeptide. Antibodies or fragments thereof can be formulated as pharmaceutical compositions and administered to a subject. It is noted that antibody-based therapeutics produced from non-human sources can cause an undesired immune response in human subjects. To minimize this problem, chimeric antibody derivatives can be produced. Chimeric antibodies combine a non-human animal variable region with a human constant region. Chimeric antibodies can be constructed according to methods known in the art (see Morrison et al., 1985, Proc. Natl. Acad. Sci. USA 81:6851; Takeda et al., 1985, Nature 314:452; U.S. Pat. No. 4,816,567 of Cabilly et al.; U.S. Pat. No. 4,816,397 of Boss et al.; European Patent Publication EP 171496; EP 0173494; United Kingdom Patent GB 2177096B).

[0269] In addition, antibodies can be further “humanized” by any of the techniques known in the art, (e.g., Teng et al., 1983, Proc. Natl. Acad. Sci. USA 80:7308-7312; Kozbor et al., 1983, Immunology Today 4: 7279; Olsson et al., 1982, Meth. Enzymol. 92:3-16; International Patent Application WO92/06193; EP 0239400). Humanized antibodies can also be obtained from commercial sources (e.g., Scotgen Limited, Middlesex, England). Immunotherapy with a humanized antibody may result in increased long-term effectiveness for the treatment of chronic disease situations or situations requiring repeated antibody treatments.

### PHARMACOGENOMICS

[0270] Pharmacogenetics: The ADAM or Interactor polynucleotides and polypeptides (e.g., shown in Tables 2-5 and 7, SEQ ID NOs. 1-9, and FIGS. 1-12) of the invention are also useful in pharmacogenetic analysis (i.e., the study of the relationship between an individual's genotype and that individual's response to a therapeutic composition or drug). See, e.g., M. Eichelbaum, 1996, Clin. Exp. Pharmacol. Physiol. 23(10-11):983-985, and M. W. Linder, 1997, Clin. Chem. 43(2):254-266. The genotype of the individual can determine the way a therapeutic acts on the body or the way the body metabolizes the therapeutic. Further, the activity of drug metabolizing enzymes affects both the intensity and duration of therapeutic activity. Differences in the activity or metabolism of therapeutics can lead to severe toxicity or therapeutic failure. Accordingly, a physician or clinician may consider applying knowledge obtained in relevant pharmacogenetic studies in determining whether to administer an ADAM or Interactor polypeptide, polynucleotide, analog, antagonist, inhibitor, or modulator, as well as tailoring the dosage and therapeutic or prophylactic treatment regimen.

[0271] In general, two types of pharmacogenetic conditions can be differentiated. Genetic conditions can be due to a single factor that alters the way the drug act on the body (altered drug action), or a factor that alters the way the body metabolizes the drug (altered drug metabolism). These conditions can occur either as rare genetic defects or as naturally-occurring polymorphisms. For example, glucose-6-phosphate dehydrogenase deficiency (G6PD) is a common inherited enzymopathy which results in haemolysis after ingestion of oxidant drugs (anti-malarials, sulfonamides, analgesics, nitrofurans) and consumption of fava beans.

[0272] The discovery of genetic polymorphisms of drug metabolizing enzymes (e.g., N-acetyltransferase 2 (NAT 2) and cytochrome P450 enzymes CYP2D6 and CYP2C19) has provided an explanation as to why some patients do not obtain the expected drug effects or show exaggerated drug response and serious toxicity after taking the standard and safe dose of a drug. These polymorphisms are expressed in two phenotypes in the population, the extensive metabolizer (EM) and poor metabolizer (PM). The prevalence of PM is different among different populations. The gene coding for CYP2D6 is highly polymorphic and several mutations have been identified in PM, which all lead to the absence of functional CYP2D6. Poor metabolizers quite frequently experience exaggerated drug response and side effects when they receive standard doses. If a metabolite is the active therapeutic moiety, PM show no therapeutic response. This has been demonstrated for the analgesic effect of codeine mediated by its CYP2D6-formed metabolite morphine. At the other extreme, ultra-rapid metabolizers fail to respond to standard doses. Recent studies have determined that ultra-rapid metabolism is attributable to CYP2D6 gene amplification.

[0273] By analogy, genetic polymorphism or mutation may lead to allelic variants of ADAM or Interactor genes in the population which have different levels of activity. The ADAM or Interactor polypeptides or polynucleotides thereby allow a clinician to ascertain a genetic predisposition that can affect treatment modality. In addition, genetic mutation or variants at other genes may potentiate or diminish the activity of ADAM or Interactor-targeted drugs. Thus, in an ADAM or Interactor gene-based treatment, a polymorphism or mutation may give rise to individuals that are more or less responsive to treatment. Accordingly, dosage would necessarily be modified to maximize the therapeutic effect within a given population containing the polymorphism. As an alternative to genotyping, specific polymorphic polypeptides or polynucleotides can be identified.

[0274] To identify genes that modify ADAM or Interactor-targeted drug response, several pharmacogenetic methods can be used. One pharmacogenomics approach, “genome-wide association”, relies primarily on a high-resolution map of the human genome. This high-resolution map shows previously identified gene-related markers (e.g., a “bi-allelic” gene marker map which consists of 60,000-100,000 polymorphic or variable sites on the human genome, each of which has two variants). A high-resolution genetic map can then be compared to a map of the genome of each of a statistically significant number of patients taking part in a Phase II/III drug trial to identify markers associated with a particular observed drug response or side effect. Alternatively, a high-resolution map can be generated from a combination of some ten million known single nucleotide polymorphisms (SNPs) in the human genome. Given a genetic map based on the occurrence of such SNPs, individuals can be grouped into genetic categories depending on a particular pattern of SNPs in their individual genome. In this way, treatment regimens can be tailored to groups of genetically similar individuals, taking into account traits that may be common among such genetically similar individuals (see, e.g., D. R. Pfost et al., 2000, Trends Biotechnol. 18(8):334-8).

[0275] As another example, the “candidate gene approach”, can be used. According to this method, if a gene that encodes a drug target is known, all common variants of that gene can be fairly easily identified in the population and it can be determined if having one version of the gene versus another is associated with a particular drug response.

[0276] As yet another example, a “gene expression profiling approach”, can be used. This method involves testing the gene expression of an animal treated with a drug (e.g., an ADAM or Interactor polypeptide, polynucleotide, analog, or modulator) to determine whether gene pathways related to toxicity have been turned on.

[0277] Information obtained from one of the approaches described herein can be used to establish a pharmacogenetic profile, which can be used to determine appropriate dosage and treatment regimens for prophylactic or therapeutic treatment an individual. A pharmacogenetic profile, when applied to dosing or drug selection, can be used to avoid adverse reactions or therapeutic failure and thus enhance therapeutic or prophylactic efficiency when treating a subject with an ADAM or Interactor polypeptide, polynucleotide, analog, antagonist, inhibitor, or modulator.

[0278] The ADAM or Interactor polypeptides or polynucleotides of the invention are also useful for monitoring therapeutic effects during clinical trials and other treatment. Thus, the therapeutic effectiveness of an agent that is designed to increase or decrease gene expression, polypeptide levels, or activity can be monitored over the course of treatment using the ADAM or Interactor compositions or modulators. For example, monitoring can be performed by: 1) obtaining a pre-administration sample from a subject prior to administration of the agent; 2) detecting the level of expression or activity of the protein in the pre-administration sample; 3) obtaining one or more post-administration samples from the subject; 4) detecting the level of expression or activity of the polypeptide in the post-administration samples; 5) comparing the level of expression or activity of the polypeptide in the pre-administration sample with the polypeptide in the post-administration sample or samples; and 6) increasing or decreasing the administration of the agent to the subject accordingly.

[0279] Gene Therapy: The ADAM or Interactor polynucleotides and polypeptides (e.g., shown in Tables 2-5 and 7, SEQ ID NOs. 1-9, and FIGS. 1-12) of the invention also find use as gene therapy reagents. In recent years, significant technological advances have been made in the area of gene therapy for both genetic and acquired diseases (Kay et al., 1997, Proc. Natl. Acad. Sci. USA, 94:12744-12746). Gene therapy can be defined as the transfer of DNA for therapeutic purposes. Improvement in gene transfer methods has allowed for development of gene therapy protocols for the treatment of diverse types of diseases. Gene therapy has also taken advantage of recent advances in the identification of new therapeutic genes, improvement in both viral and non-viral gene delivery systems, better understanding of gene regulation, and improvement in cell isolation and transplantation. Gene therapy would be carried out according to generally accepted methods as described by, for example, Friedman, 1991, Therapy for Genetic Diseases, Friedman, Ed., Oxford University Press, pages 105-121.

[0280] Vectors for introduction of genes both for recombination and for extrachromosomal maintenance are known in the art, and any suitable vector may be used. Methods for introducing DNA into cells such as electroporation, calcium phosphate co-precipitation, and viral transduction are known in the art, and the choice of method is within the competence of one skilled in the art (Robbins (ed), 1997, Gene Therapy Protocols, Human Press, NJ). Cells transformed with an ADAM or Interactor gene can be used as model systems to study asthma and other related disorders and to identify drug treatments for the treatment of such disorders.

[0281] Gene transfer systems known in the art may be useful in the practice of the gene therapy methods of the present invention. These include viral and non-viral transfer methods. A number of viruses have been used as gene transfer vectors, including polyoma, i.e., SV40 (Madzak et al., 1992, J. Gen. Virol., 73:1533-1536), adenovirus (Berkner, 1992, Curr. Top. Microbiol. Immunol., 158:39-6; Berkner et al., 1988, Bio Techniques, 6:616-629; Gorziglia et al., 1992, J. Virol., 66:4407-4412; Quantin et al., 1992, Proc. Natl. Acad. Sci. USA, 89:2581-2584; Rosenfeld et al., 1992, Cell, 68:143-155; Wilkinson et al., 1992, Nucl. Acids Res., 20:2233-2239; Stratford-Perricaudet et al., 1990, Hum. Gene Ther., 1:241-256), vaccinia virus (Mackett et al., 1992, Biotechnology, 24:495-499), adeno-associated virus (Muzyczka, 1992, Curr. Top. Microbiol. Immunol., 158:91-123; Ohi et al., 1990, Gene, 89:279-282), herpes viruses including HSV and EBV (Margolskee, 1992, Curr. Top. Microbiol. Immunol., 158:67-90; Johnson et al., 1992, J. Virol., 66:2952-2965; Fink et al., 1992, Hum. Gene Ther., 3:11-19; Breakfield et al., 1987, Mol. Neurobiol., 1:337-371; Fresse et al., 1990, Biochem. Pharmacol., 40:2189-2199), and retroviruses of avian (Brandyopadhyay et al., 1984, Mol. Cell Biol., 4:749-754; Petropouplos et al., 1992, J. Virol., 66:3391-3397), murine (Miller, 1992, Curr. Top. Microbiol. Immunol., 158:1-24; Miller et al., 1985, Mol. Cell Biol., 5:431-437; Sorge et al., 1984, Mol. Cell Biol., 4:1730-1737; Mann et al., 1985, J. Virol., 54:401-407), and human origin (Page et al., 1990, J. Virol., 64:5370-5276; Buchschalcher et al., 1992, J. Virol., 66:2731-2739). Most human gene therapy protocols have been based on disabled murine retroviruses.

[0282] Non-viral gene transfer methods known in the art include chemical techniques such as calcium phosphate coprecipitation (Graham et al., 1973, Virology, 52:456-467; Pellicer et al., 1980, Science, 209:1414-1422), mechanical techniques, for example microinjection (Anderson et al., 1980, Proc. Natl. Acad. Sci. USA, 77:5399-5403; Gordon et al., 1980, Proc. Natl. Acad. Sci. USA, 77:7380-7384; Brinster et al., 1981, Cell, 27:223-231; Constantini et al., 1981, Nature, 294:92-94), membrane fusion-mediated transfer via liposomes (Felgner et al., 1987, Proc. Natl. Acad. Sci. USA, 84:7413-7417; Wang et al., 1989, Biochemistry, 28:9508-9514; Kaneda et al., 1989, J. Biol. Chem., 264:12126-12129; Stewart et al., 1992, Hum. Gene Ther., 3:267-275; Nabel et al., 1990, Science, 249:1285-1288; Lim et al., 1992, Circulation, 83:2007-2011), and direct DNA uptake and receptor-mediated DNA transfer (Wolff et al., 1990, Science, 247:1465-1468; Wu et al., 1991, BioTechniques, 11:474-485; Zenke et al., 1990, Proc. Natl. Acad. Sci. USA, 87:3655-3659; Wu et al., 1989, J. Biol. Chem., 264:16985-16987; Wolff et al., 1991, BioTechniques, 11:474-485; Wagner et al., 1991, Proc. Natl. Acad. Sci. USA, 88:4255-4259; Cotten et al., 1990, Proc. Natl. Acad. Sci. USA, 87:4033-4037; Curiel et al., 1991, Proc. Natl. Acad. Sci. USA, 88:8850-8854; Curiel et al., 1991, Hum. Gene Ther., 3:147-154).

[0283] In one approach, plasmid DNA is complexed with a polylysine-conjugated antibody specific to the adenovirus hexon protein, and the resulting complex is bound to an adenovirus vector. The trimolecular complex is then used to infect cells. The adenovirus vector permits efficient binding, internalization, and degradation of the endosome before the coupled DNA is damaged. In another approach, liposome/DNA is used to mediate direct in vivo gene transfer. While in standard liposome preparations the gene transfer process is non-specific, localized in vivo uptake and expression have been reported in tumor deposits, for example, following direct in situ administration (Nabel, 1992, Hum. Gene Ther., 3:399-410).

[0284] Suitable gene transfer vectors possess a promoter sequence, preferably a promoter that is cell-specific and placed upstream of the sequence to be expressed. The vectors may also contain, optionally, one or more expressible marker genes for expression as an indication of successful transfection and expression of the nucleic acid sequences contained in the vector. In addition, vectors can be optimized to minimize undesired immunogenicity and maximize long-term expression of the desired gene product(s) (see Nabe, 1999, Proc. Natl. Acad. Sci. USA 96:324-326). Moreover, vectors can be chosen based on cell-type that is targeted for treatment. Notably, gene transfer therapies have been initiated for the treatment of various pulmonary diseases (see, e.g., M. J. Welsh, 1999, J. Clin. Invest. 104(9):1165-6; D. L. Ennist, 1999, Trends Pharmacol. Sci. 20:260-266; S. M. Albelda et al., 2000, Ann. Intern. Med. 132:649-660; E. Alton and C. Kitson C., 2000, Expert Opin. Investig. Drugs. 9(7):1523-35).

[0285] Illustrative examples of vehicles or vector constructs for transfection or infection of the host cells include replication-defective viral vectors, DNA virus or RNA virus (retrovirus) vectors, such as adenovirus, herpes simplex virus and adeno-associated viral vectors. Adeno-associated virus vectors are single stranded and allow the efficient delivery of multiple copies of nucleic acid to the cell's nucleus. Preferred are adenovirus vectors. The vectors will normally be substantially free of any prokaryotic DNA and may comprise a number of different functional nucleic acid sequences. An example of such functional sequences may be a DNA region comprising transcriptional and translational initiation and termination regulatory sequences, including promoters (e.g., strong promoters, inducible promoters, and the like) and enhancers which are active in the host cells. Also included as part of the functional sequences is an open reading frame (polynucleotide sequence) encoding a protein of interest. Flanking sequences may also be included for site-directed integration. In some situations, the 5′-flanking sequence will allow homologous recombination, thus changing the nature of the transcriptional initiation region, so as to provide for inducible or non-inducible transcription to increase or decrease the level of transcription, as an example.

[0286] In general, the encoded and expressed ADAM or Interactor polypeptide may be intracellular, i.e., retained in the cytoplasm, nucleus, or in an organelle, or may be secreted by the cell. For secretion, the natural signal sequence present in an ADAM or Interactor polypeptide may be retained. When the polypeptide or peptide is a fragment of an ADAM or Interactor protein, a signal sequence may be provided so that, upon secretion and processing at the processing site, the desired protein will have the natural sequence. Specific examples of coding sequences of interest for use in accordance with the present invention include the ADAM or Interactor polypeptide-coding sequences disclosed herein.

[0287] As previously mentioned, a marker may be present for selection of cells containing the vector construct. The marker may be an inducible or non-inducible gene and will generally allow for positive selection under induction, or without induction, respectively. Examples of marker genes include neomycin, dihydrofolate reductase, glutamine synthetase, and the like. The vector employed will generally also include an origin of replication and other genes that are necessary for replication in the host cells, as routinely employed by those having skill in the art. As an example, the replication system comprising the origin of replication and any proteins associated with replication encoded by a particular virus may be included as part of the construct. The replication system must be selected so that the genes encoding products necessary for replication do not ultimately transform the cells. Such replication systems are represented by replication-defective adenovirus (see G. Acsadi et al., 1994, Hum. Mol. Genet. 3:579-584) and by Epstein-Barr virus. Examples of replication defective vectors, particularly, retroviral vectors that are replication defective, are BAG, (see Price et al., 1987, Proc. Natl. Acad. Sci. USA, 84:156; Sanes et al., 1986, EMBO J., 5:3133). It will be understood that the final gene construct may contain one or more genes of interest, for example, a gene encoding a bioactive metabolic molecule. In addition, cDNA, synthetically produced DNA or chromosomal DNA may be employed utilizing methods and protocols known and practiced by those having skill in the art.

[0288] According to one approach for gene therapy, a vector encoding an ADAM or Interactor polypeptide is directly injected into the recipient cells (in vivo gene therapy). Alternatively, cells from the intended recipients are explanted, genetically modified to encode an ADAM or Interactor polypeptide, and reimplanted into the donor (ex vivo gene therapy). An ex vivo approach provides the advantage of efficient viral gene transfer, which is superior to in vivo gene transfer approaches. In accordance with ex vivo gene therapy, the host cells are first transfected with engineered vectors containing at least one gene encoding an ADAM or Interactor polypeptide, suspended in a physiologically acceptable carrier or excipient such as saline or phosphate buffered saline, and the like, and then administered to the host. The desired gene product is expressed by the injected cells, which thus introduce the gene product into the host. The introduced gene products can thereby be utilized to treat or ameliorate a disorder (e.g., asthma, obesity, or inflammatory bowel disease) that is related to altered levels of the ADAM or Interactor polypeptide.

### ANIMAL MODELS

[0289] In accordance with the present invention, ADAM or Interactor polynucleotides (e.g., shown in Tables 2-5 and 7, SEQ ID NOs. 1-9, and FIGS. 1-12) can be used to generate genetically altered non-human animals or human cell lines. Any non-human animal can be used; however typical animals are rodents, such as mice, rats, or guinea pigs. Genetically engineered animals or cell lines can carry a gene that has been altered to contain deletions, substitutions, insertions, or modifications of the polynucleotide sequence (e.g., exon sequence). Such alterations may render the gene nonfunctional, (i.e., a null mutation) producing a “knockout” animal or cell line. In addition, genetically engineered animals can carry one or more exogenous or non-naturally occurring genes, i.e., “transgenes”, that are derived from different organisms (e.g., humans), or produced by synthetic or recombinant methods. Genetically altered animals or cell lines can be used to study ADAM or Interactor gene function, regulation, and treatments for ADAM or Interactor-related diseases. In particular, knockout animals and cell lines can be used to establish animal models and in vitro models for ADAM or Interactor-qter-related illnesses, respectively. In addition, transgenic animals expressing human ADAM or Interactor-qter can be used in drug discovery efforts.

[0290] A “transgenic animal” is any animal containing one or more cells bearing genetic information altered or received, directly or indirectly, by deliberate genetic manipulation at a subcellular level, such as by targeted recombination or microinjection or infection with recombinant virus. The term “transgenic animal” is not intended to encompass classical cross-breeding or in vitro fertilization, but rather is meant to encompass animals in which one or more cells are altered by, or receive, a recombinant DNA molecule. This recombinant DNA molecule may be specifically targeted to a defined genetic locus, may be randomly integrated within a chromosome, or it may be extrachromosomally replicating DNA.

[0291] Transgenic animals can be selected after treatment of germline cells or zygotes. For example, expression of an exogenous ADAM or Interactor gene or a variant can be achieved by operably linking the gene to a promoter and optionally an enhancer, and then microinjecting the construct into a zygote (see, e.g., Hogan et al., Manipulating the Mouse Embryo, A Laboratory Manual, Cold Spring Harbor Laboratory, Cold Spring Harbor, N.Y.). Such treatments include insertion of the exogenous gene and disrupted homologous genes. Alternatively, the gene(s) of the animals may be disrupted by insertion or deletion mutation of other genetic alterations using conventional techniques (see, e.g., Capecchi, 1989, Science, 244:1288; Valancuis et al., 1991, Mol. Cell Biol., 11:1402; Hasty et al., 1991, Nature, 350:243; Shinkai et al., 1992, Cell, 68:855; Mombaerts et al., 1992, Cell, 68:869; Philpott et al., 1992, Science, 256:1448; Snouwaert et al., 1992, Science, 257:1083; Donehower et al., 1992, Nature, 356:215).

[0292] In one aspect of the invention, ADAM or Interactor gene knockout mice can be produced in accordance with well-known methods (see, e.g., M. R. Capecchi, 1989, Science, 244:1288-1292; P. Li et al., 1995, Cell 80:401-411; L. A. Galli-Taliadoros et al., 1995, J. Immunol. Methods 181(1):1-15; C. H. Westphal et al., 1997, Curr. Biol. 7(7):530-3; S. S. Cheah et al., 2000, Methods Mol. Biol. 136:455-63). The disclosed murine ADAM or Interactor genomic clone can be used to prepare an ADAM or Interactor targeting construct that can disrupt ADAM or Interactor in the mouse by homologous recombination at the ADAM or Interactor chromosomal locus. The targeting construct can comprise a disrupted or deleted ADAM or Interactor gene sequence that inserts in place of the functioning portion of the native mouse gene. For example, the construct can contain an insertion in the ADAM or Interactor protein-coding region.

[0293] Preferably, the targeting construct contains markers for both positive and negative selection. The positive selection marker allows the selective elimination of cells that lack the marker, while the negative selection marker allows the elimination of cells that carry the marker. In particular, the positive selectable marker can be an antibiotic resistance gene, such as the neomycin resistance gene, which can be placed within the coding sequence of an ADAM or Interactor gene to render it non-functional, while at the same time rendering the construct selectable. The herpes simplex virus thymidine kinase (HSV tk) gene is an example of a negative selectable marker that can be used as a second marker to eliminate cells that carry it. Cells with the HSV tk gene are selectively killed in the presence of gangcyclovir. As an example, a positive selection marker can be positioned on a targeting construct within the region of the construct that integrates at the locus of the ADAM or Interactor gene. The negative selection marker can be positioned on the targeting construct outside the region that integrates at the locus of the ADAM or Interactor gene. Thus, if the entire construct is present in the cell, both positive and negative selection markers will be present. If the construct has integrated into the genome, the positive selection marker will be present, but the negative selection marker will be lost.

[0294] The targeting construct can be employed, for example, in embryonal stem cell (ES). ES cells may be obtained from pre-implantation embryos cultured in vitro (M. J. Evans et al., 1981, Nature 292:154-156; M. O. Bradley et al., 1984, Nature 309:255-258; Gossler et al., 1986, Proc. Natl. Acad. Sci. USA 83:9065-9069; Robertson et al., 1986, Nature 322:445-448; S. A. Wood et al., 1993, Proc. Natl. Acad. Sci. USA 90:4582-4584). Targeting constructs can be efficiently introduced into the ES cells by standard techniques such as DNA transfection or by retrovirus-mediated transduction. Following this, the transformed ES cells can be combined with blastocysts from a non-human animal. The introduced ES cells colonize the embryo and contribute to the germ line of the resulting chimeric animal (R. Jaenisch, 1988, Science 240:1468-1474). The use of gene-targeted ES cells in the generation of gene-targeted transgenic mice has been previously described (Thomas et al., 1987, Cell 51:503-512) and is reviewed elsewhere (Frohman et al., 1989, Cell 56:145-147; Capecchi, 1989, Trends in Genet. 5:70-76; Baribault et al., 1989, Mol. Biol. Med. 6:481-492; Wagner, 1990, EMBO J. 9:3025-3032; Bradley et al., 1992, Bio/Technology 10: 534-539).

[0295] Several methods can be used to select homologously recombined murine ES cells. One method employs PCR to screen pools of transformant cells for homologous insertion, followed by screening individual clones (Kim et al., 1988, Nucleic Acids Res. 16:8887-8903; Kim et al., 1991, Gene 103:227-233). Another method employs a marker gene is constructed which will only be active if homologous insertion occurs, allowing these recombinants to be selected directly (Sedivy et al., 1989, Proc. Natl. Acad. Sci. USA 86:227-231). For example, the positive-negative selection (PNS) method can be used as described above (see, e.g., Mansour et al., 1988, Nature 336:348-352; Capecchi, 1989, Science 244:1288-1292; Capecchi, 1989, Trends in Genet. 5:70-76). In particular, the PNS method is useful for targeting genes that are expressed at low levels.

[0296] The absence of functional ADAM or Interactor genes in the knockout mice can be confirmed, for example, by RNA analysis, protein expression analysis, and functional studies. For RNA analysis, RNA samples are prepared from different organs of the knockout mice and the ADAM or Interactor transcript is detected in Northern blots using oligonucleotide probes specific for the transcript. For protein expression detection, antibodies that are specific for the ADAM or Interactor polypeptide are used, for example, in flow cytometric analysis, immunohistochemical staining, and activity assays. Alternatively, functional assays are performed using preparations of different cell types collected from the knockout mice.

[0297] Several approaches can be used to produce transgenic mice. In one approach, a targeting vector is integrated into ES cell by homologous recombination, an intrachromosomal recombination event is used to eliminate the selectable markers, and only the transgene is left behind (A. L. Joyner et al., 1989, Nature 338(6211):153-6; P. Hasty et al., 1991, Nature 350(6315):243-6; V. Valancius and O. Smithies, 1991, Mol. Cell Biol. 11(3):1402-8; S. Fiering et al., 1993, Proc. Natl. Acad. Sci. USA 90(18):8469-73). In an alternative approach, two or more strains are created; one strain contains the gene knocked-out by homologous recombination, while one or more strains contain transgenes. The knockout strain is crossed with the transgenic strain to produce new line of animals in which the original wild-type allele has been replaced (although not at the same site) with a transgene. Notably, knockout and transgenic animals can be produced by commercial facilities (e.g., The Lerner Research Institute, Cleveland, OH; B&K Universal, Inc., Fremont, Calif.; DNX Transgenic Sciences, Cranbury, N.J.; Incyte Genomics, Inc., St. Louis, Mo.).

[0298] Transgenic animals (e.g., mice) containing a nucleic acid molecule which encodes a human ADAM or Interactor polypeptide, may be used as in vivo models to study the overexpression of an ADAM or Interactor gene. Such animals can also be used in drug evaluation and discovery efforts to find compounds effective to inhibit or modulate the activity of a 12q23-qter gene, such as for example compounds for treating respiratory disorders, diseases, or conditions. One having ordinary skill in the art can use standard techniques to produce transgenic animals which produce a human ADAM or Interactor polypeptide, and use the animals in drug evaluation and discovery projects (see, e.g., U.S. Pat. No. 4,873,191 to Wagner; U.S. Pat. No. 4,736,866 to Leder).

[0299] In another embodiment of the present invention, the transgenic animal can comprise a recombinant expression vector in which the nucleotide sequence that encodes a human ADAM or Interactor polypeptide is operably linked to a tissue specific promoter whereby the coding sequence is only expressed in that specific tissue. For example, the tissue specific promoter can be a mammary cell specific promoter and the recombinant protein so expressed is recovered from the animal's milk.

[0300] In yet another embodiment of the present invention, an ADAM or Interactor gene “knockout” can be produced by administering to the animal antibodies (e.g., neutralizing antibodies) that specifically recognize an endogenous ADAM or Interactor polypeptides. The antibodies can act to disrupt function of the endogenous ADAM or Interactor polypeptide, and thereby produce a null phenotype. In one specific example, an orthologous mouse ADAM or Interactor polypeptide or peptide can be used to generate antibodies. These antibodies can be given to a mouse to knockout the function of the mouse ADAM or Interactor ortholog.

[0301] In another embodiment of the present invention, non-mammalian organisms may be used to study ADAM or Interactor genes and ADAM or Interactor-related diseases. In particular, model organisms such as C. elegans, D. melanogaster, and S. cerevisiae may be used. Orthologs of ADAM or Interactor genes can be identified in these model organisms, and mutated or deleted to produce strains deficient for ADAM or Interactor genes. Human ADAM or Interactor genes can then be tested for the ability to “complement” the deficient strains. Such strains can also be used for drug screening. The ADAM or Interactor orthologs can be used to facilitate the understanding of the biological function of the human ADAM or Interactor genes, and assist in the identification of binding factors (e.g., agonists, antagonists, and inhibitors).

### EXAMPLES

[0302] The examples as set forth herein are meant to exemplify the various aspects of the present invention and are not intended to limit the invention in any way.

### Example 1

[0303] Family Collection

[0304] Asthma is a complex disorder that is influenced by a variety of factors, including both genetic and environmental effects. Complex disorders are typically caused by multiple interacting genes, some contributing to disease development and some conferring a protective effect. The success of linkage analyses in identifying chromosomes with significant LOD scores is achieved in part as a result of an experimental design tailored to the detection of susceptibility genes in complex diseases, even in the presence of epistasis and genetic heterogeneity. Also important are rigorous efforts in ascertaining asthmatic families that meet strict guidelines, and collecting accurate clinical information.

[0305] Given the complex nature of the asthma phenotype, non-parametric affected sib pair analyses were used to analyze the genetic data. This approach does not require parameter specifications such as mode of inheritance, disease allele frequency, penetrance of the disorder, or phenocopy rates. Instead, it determines whether the inheritance pattern of a chromosomal region is consistent with random segregation. If it is not, affected siblings inherit identical copies of alleles more often than expected by chance. Because no models for inheritance are assumed, allele-sharing methods tend to be more robust than parametric methods when analyzing complex disorders. They do, however, require larger sample sizes to reach statistically significant results.

[0306] At the outset of the program, the goal was to collect 400 affected sib-pair families for the linkage analyses. Based on a genome scan with markers spaced ˜10 cM apart, this number of families was predicted to provide >95% power to detect an asthma susceptibility gene that caused an increased risk to first-degree relatives of 3-fold or greater. The assumed relative risk of 3-fold was consistent with epidemiological studies in the literature that suggest an increased risk ranging from 3- to 7-fold. The relative risk was based on gender, different classifications of the asthma phenotype (i.e., bronchial hyper-responsiveness versus physician's diagnosis) and, in the case of offspring, whether one or both parents were asthmatic.

[0307] The family collection efforts exceeded the initial goal of 400, and resulted in a total of 444 affected sibling pair (ASP) families, with 342 families from the UK and 102 families from the US. The ASP families in the US collection were Caucasian with a minimum of two affected siblings that were identified through both private practice and community physicians as well as through advertising. A total of 102 families were collected in Kansas, Nebraska, and Southern California. In the UK collection, Caucasian families with a minimum of two affected siblings were identified through physicians' registers in a region surrounding Southampton and including the Isle of Wight. In both the US and UK collections, additional affected and unaffected sibs were collected whenever possible.

[0308] An additional 63 families from the United Kingdom were utilized from an earlier collection effort with different ascertainment criteria. These families were recruited either: 1) without reference to asthma and atopy; or 2) by having at least one family member or at least two family members affected with asthma. The randomly ascertained samples were identified from general practitioner registers in the Southampton area. For families with affected members, the probands were recruited from hospital based clinics in Southampton. Seven pedigrees extended beyond a single nuclear family. The phenotypic and genotypic data information for 17 markers for 21 of these 63 families was obtained from the website http://cedar.genetics.soton.ac.uk/pub/PROGRAMS/BETA/data/bet12.ped.

[0309] Families were included in the study if they met all of the following criteria: 1) the biological mother and biological father were Caucasian and agreed to participate in the study; 2) at least two biological siblings were alive, each with a current physician diagnosis of asthma, and were 5 to 21 years of age; and 3) the two siblings were currently taking asthma medications on a regular basis. This included regular, intermittent use of inhaled or oral bronchodilators and regular use of cromolyn, theophylline, or steroids.

[0310] Families were excluded from the study if they met any one of the following criteria: 1) both parents were affected (i.e., with a current diagnosis of asthma, having asthma symptoms, or on asthma medications at the time of the study); 2) any of the siblings to be included in the study was less than 5 years of age; 3) any asthmatic family member to be included in the study was taking beta-blockers at the time of the study, 4) any family member to be included in the study had congenital or acquired pulmonary disease at birth (e.g., cystic fibrosis), a history of serious cardiac disease (myocardial infarction), or any history of serious pulmonary disease (e.g., emphysema); or 5) any family member to be included in the study was pregnant.

[0311] An extensive clinical instrument was designed and data from all participating family members were collected. The case report form (CRF) included questions on demographics, medical history including medications, a health survey on the incidence and frequency of asthma, wheeze, eczema, hay fever, nasal problems, smoking, and questions on home environment. Data from a video questionnaire designed to show various examples of wheeze and asthmatic attacks were also included in the CRF. Clinical data, including skin prick tests to 8 common allergens, total and specific IgE levels, and bronchial hyper-responsiveness following a methacholine challenge, were also collected from all participating family members. All data were entered into a SAS dataset by IMTCI, a CRO; either by double data entry or scanning followed by on-screen visual validation. An extensive automated review of the data was performed on a routine basis and a full audit at the conclusion of the data entry was completed to verify the accuracy of the dataset.

### Example 2

[0312] Genome Scan

[0313] In order to identify chromosomal regions linked to asthma, the inheritance pattern of alleles from genetic markers spanning the genome was assessed on the collected family resources. As described above, combining these results with the segregation of the asthma phenotype in these families allows the identification of genetic markers that are tightly linked to asthma. In turn, this provides an indication of the location of genes predisposing affected individuals to asthma. The genotyping strategy was twofold: 1) to conduct a genome wide scan using markers spaced at approximately 10 cM intervals; and 2) to target ten chromosomal regions for high density genetic mapping. The initial candidate regions for high-density mapping were chosen based on suggestions of linkage to these regions by other investigators.

[0314] Genotypes of PCR amplified simple sequence microsatellite genetic linkage markers were determined using ABI model 377 Automated Sequencers (PE Applied Biosystems). Microsatellite markers were obtained from Research Genetics Inc. (Huntsville, Ala.) in the fluorescent dye-conjugated form (see Dubovsky et al., 1995, Hum. Mol. Genet. 4(3):449-452). The markers comprised a variation of a human linkage mapping panel as released from the Cooperative Human Linkage Center (CHLC), also known as the Weber lab screening set version 8. The variation of the Weber 8 screening set consisted of 529 markers with an average spacing of 6.9 cM (autosomes only) and 7.0 cM (all chromosomes). Eighty-nine percent of the markers consisted of either tri- or tetra-nucleotide microsatellites. There were no gaps present in chromosomal coverage greater than 17.5 cM.

[0315] Study subject genomic DNA (5 μl; 4.5 ng/μl) was amplified in a 10 μl PCR reaction using AmpliTaq Gold DNA polymerase (0.225 U); 1× PCR buffer (80 mM (NH₄)₂SO₄; 30 mM Tris-HCl (pH 8.8); 0.5% Tween-20); 200 μM each dATP, dCTP, dGTP and dTTP; 1.5-3.5 μM MgCl₂; and 250 μM forward and reverse PCR primers. PCR reactions were set up in 192 well plates (Costar) using a Tecan Genesis 150 robotic workstation equipped with a refrigerated deck. PCR reactions were overlaid with 20 μl mineral oil, and thermocycled on an MJ Research Tetrad DNA Engine equipped with four 192 well heads using the following conditions: 92° C. for 3 min; 6 cycles of 92° C. for 30 sec, 56° C. for 1 min, 72° C. for 45 sec; followed by 20 cycles of 92° C. for 30 sec, 55° C. for 1 min, 72° C. for 45 sec; and a 6 min incubation at 72° C.

[0316] PCR products of 8-12 microsatellite markers were subsequently pooled into two 96-well microtitre plates (2.0 μl PCR product from TET and FAM labeled markers, 3.0 μl HEX labeled markers) using a Tecan Genesis 200 robotic workstation and brought to a final volume of 25 μl with H₂O. Following this, 1.9 μl of pooled PCR product was transferred to a loading plate and combined with 3.0 μl loading buffer (2.5 μl formamide/blue dextran (9.0 mg/ml), 0.5 μl GS-500 TAMRA labeled size standard, ABI). Samples were denatured in the loading plate for 4 min at 95° C., placed on ice for 2 min, and electrophoresed on a 5% denaturing polyacrylamide gel (FMC on the ABI 377XL). Samples (0.8 μl) were loaded onto the gel using an 8 channel Hamilton Syringe pipettor.

[0317] Each gel consisted of 62 study subjects and 2 control subjects (CEPH parents ID #1331-01 and 1331-02, Coriell Cell Repository, Camden, N.J.). Genotyping gels were scored in duplicate by investigators blind to patient identity and affection status using GENOTYPER analysis software V 1.1.12 (ABI; PE Applied Biosystems). Nuclear families were loaded onto the gel with the parents flanking the siblings to facilitate error detection. The final tables obtained from the GENOTYPER output for each gel analysed were imported into a SYBASE Database.

[0318] Allele calling (binning) was performed using the SYBASE version of the ABAS software (Ghosh et al., 1997, Genome Research 7:165-178). Offsize bins were checked manually and incorrect calls were corrected or blanked. The binned alleles were then imported into the program MENDEL (Lange et al., 1988, Genetic Epidemiology, 5:471) for inheritance checking using the USERM13 subroutine (Boehnke et al., 1991, Am. J. Hum. Genet. 48:22-25). Non-inheritance was investigated by examining the genotyping traces and, once all discrepancies were resolved, the subroutine USERM13 was used to estimate allele frequencies.

### Example 3

[0319] Linkage Analysis

[0320] Chromosomal regions harboring asthma susceptibility genes were identified by linkage analysis of genotyping data and three separate phenotypes, asthma, bronchial hyper-responsiveness, and atopic status.

[0321] 1. Asthma Phenotype: For the initial linkage analysis, the phenotype and asthma affection status were defined by a patient who answered the following questions in the affirmative: i) Have you ever had asthma? ii) Do you have a current physician's diagnosis of asthma? and iii) Are you currently taking asthma medications? Medications included inhaled or oral bronchodilators, cromolyn, theophylline, or steroids. Multipoint linkage analyses of allele sharing in affected individuals were performed using the MAPMAKER/SIBS analysis program (L. Kruglyak and E. S. Lander, 1995, Am. J. Hum. Genet. 57:439-454).

[0322] 2. Phenotypic Subgroups: Nuclear families were ascertained by the presence of at least two affected siblings with a current physician's diagnosis of asthma, as well as the use of asthma medication. In the initial analysis (see above), the evidence was examined for linkage based on that dichotomous phenotype (asthma—yes/no). To further characterize the linkage signals, additional quantitative traits were measured in the clinical protocol. Since quantitative trait loci (QTL) analysis tools with correction for ascertainment were not available, the following approach was taken to refine the linkage and association analyses:

[0323] i. Phenotypic subgroups that could be indicative of an underlying genotypic heterogeneity were identified. Asthma subgroups were defined according to 1) bronchial hyper-responsiveness (BHR) to methacholine challenge; or 2) atopic status using quantitative measures like total serum IgE and specific IgE to common allergens.

[0324] ii. Non-parametric linkage analyses were performed on subgroups to test for the presence of a more homogeneous sub-sample. If genetic heterogeneity was present in the sample, the amount of allele sharing among phenotypically similar siblings was expected to increase in the appropriate subgroup in comparison to the full sample. A narrower region of significant increased allele sharing was also expected to result unless the overall LOD score decreased as a consequence of having a smaller sample size and of using an approximate partitioning of the data.

[0325] 3. Results for BHR and IqE: PC₂₀, the concentration of methacholine resulting in a 20% drop in FEV₁ (forced expiratory volume), was polychotomized into four groups and analyses were performed on the subsets of asthmatic children with borderline to severe BHR (PC₂₀≦16 mg/ml) or PC₂₀(16). Total IgE was dichotomized using an age specific cutoff for elevated levels (one standard deviation above the mean: 52 kU/L for age 5-9; 63 kU/L for age 10-14; 75 kU/L for age 15-18; and 81 kU/L for adults). Similarly, a dichotomous variable was created using specific IgE to common allergens. An individual was assigned a high specific IgE value if his/her level was positive (grass or tree) or elevated (>0.35 KU/L for cat, dog, mite A, mite B, alternaria, or ragweed) for at least one such measure.

[0326] Based on the identification of an ADAM33 (Gene 216) located within chromosome 20 as described in U.S. patent application Ser. No. 09/834,597 and PCT/US01/12245 other family members, substrates and interactors were investigated as additional candidate genes (“disorder associated genes”). A pattern of evidence by linkage analysis pointed to the existence of several asthma susceptibility loci within the chromosomal regions identified in Table 1. This was supported by the initial analysis of the asthma (yes/no) phenotype with further localization by analyses of BHR, total IgE, and specific IgE in asthmatic individuals. Table 1 describes multipoint analysis results across the four phenotypes described above. The first column contains the gene name and the second column contains the chromosome number. The location of the gene is denoted in column three in centemorgans. The corresponding phenotypes and respective LOD scores are contained within the fourth, fifth, sixth and seventh columns. The results thus indicate that the genes located within these regions having a significant LOD score are involved in asthma and related diseases thereof.

TABLE 1

| | | | | Asthma & | Asthma & | Asthma & |
|---|---|---|---|---|---|---|
| | Chr. | Loc. (cM) | Asthma | BHR | Total IgE | Specific IgE |
| ADAMI9 | 5 | 159.8 | 1.11 | 1.33 | 0.95 | 1.67 |
| NRG2 | 5 | 142.9 | 0.78 | 1.49 | 0.70 | 0.69 |
| NRG1 | 8 | 61.6 | 1.04 | 1.09 | 1.08 | 0.64 |
| SH3GL2.EN | 9 | 18.0 | 0.94 | 2.99 | 1.00 | 1.22 |
| DOPHILIN1 | | | | | | |
| SH3GL1.EN | 19 | 15.6 | 2.86 | 2.30 | 2.22 | 2.66 |
| DOPHILIN2 | | | | | | |
| ADAM3A | 8 | 34.8-64.6 | 0.85 | 0.59 | 1.21 | 0.47 |
| ADAM7 | 8 | 48.1 | 0.94 | 0.47 | 1.30 | 0.40 |
| ADAM28 | 8 | 47.8 | 0.94 | 0.48 | 1.30 | 0.41 |
| ADAM9 | 8 | 60.0-65.8 | 1.10 | 1.14 | 1.00 | 0.70 |
| ADAM2 | 8 | 64.6 | 1.19 | 1.22 | 0.89 | 0.79 |
| ADAM18 | 8 | 64.6 | 1.19 | 1.22 | 0.89 | 0.79 |
| ADAMTS2 | 5 | 192.8 | 1.13 | 0.71 | 1.68 | 2.51 |
| ADAMTS3 | 4 | 80.9 | 0.77 | 0.71 | 1.48 | 0.31 |
| ADAMTS9 | 3 | 89.9 | 0.26 | 0.29 | 1.23 | 0.23 |
| ADAMDEC1 | 8 | 47.9 | 0.94 | 0.48 | 1.30 | 0.40 |

### Example 4

[0327] Gene Identification

[0328] Based on the linkage results above, genes were identified at the chromosomal locations described of Table 1 using the National Council for Biotechnology website (www.ncbi.gov). The genes and their related information are contained within Table 2. In addition, the alternate splice variants are also provided in Table 2. Column one, two and three of Table 2 contain the gene identifier, gene symbol and gene name, respectively. The accession numbers for the corresponding cDNA sequence are contained in the fourth column. The amino acid sequence accession number is listed in the fifth column. The genomic sequences accession numbers are provided in the sixth and seventh columns. In particular, the genomic contig for the region containing the gene is provided in the sixth column. The individual bacterial artificial chromosomes spanning the region containing the gene are listed with their respective accession numbers in seventh column. One skilled in the art could obtain the above described nucleic and amino acid sequences using the accession numbers provided herein. The eighth column provides the genetic marker of the location on the chromosome. And the gene description is provided in the ninth column.

[0329] Based on the linkage analysis, the genes described in Table 2 are involved in asthma and related diseases thereof.

TABLE 2

| | | | | | GenBank | | | |
|---|---|---|---|---|---|---|---|---|
| | | | | GenBank | Genomic | | | |
| | | | GenBank NT | Protein | Contig | GenBank | | |
| Gene Name | Gene Symbol | Gene Name | Accession # | Accession # | Accession # | Genomic Clone Accession # | Marker | Description |
| Gene845 | Adam19 | a disintegrin and metalloproteinase | NM_023038 | NP_075525 | NT_006788 | AC008676, AC008694 | stSG53531 | This variant (isoform-1) encodes a |
| | | domain 19 (meltrin beta) | | | | | | longer isoform which is divergent from |
| | | | | | | | | isoform 2 in the C-terminus. |
| Gene845 | Adam19 | a disintegrin and metalloproteinase | NM_033274 | NP_50377 | NT_006788 | AC008676, AC008694 | s1SG53531 | This variant (isoform-2) encodes a |
| | | domain 19 (mellna beta) | | | | | | shorter sotorm which is divergent from |
| | | | | | | | | isoform 1 in the C-terminus |
| Gene847 | NRG2 | neuregulin 2 | NM_004883 | NP_004874 | NT_007018 | AC008667, AC008523, AC011589, | | Splice vanant 1 lacks enons 6 and 7 |
| | | | | | | AC010292, AC026272, AC011379 | | |
| Gene847 | NRG2 | neuregulin 2 | NM_013981 | NP_053584 | NT_007018 | AC008667, AC008523, AC011589, | | Splice variant 2 lacks exons 5 and 7 |
| | | | | | | AC010292, AC028272, AC011379 | | |
| Gene847 | NRG2 | neuregulin 2 | NM_013982 | NP_053585 | NT_007018 | AC008667, AC008523, ACO11589, | | Splice variant 3 encludes enon 6 |
| | | | | | | AC010292, AC026272, AC011379 | | |
| Gene847 | NRG2 | neuregulin 2 | NM_013983 | NP_053586 | NT_007018 | AC008667, AC008523, AC011589, | | Splice variant 4 excludes exon 5 |
| | | | | | | AC010292, AC026272, AC011379 | | |
| Gene847 | NRG2 | neuregulin 2 | NM_013984 | NP_053587 | NT_007018 | AC008667, AC008523, AC011589, | | Splice variant 5 excludes enons 7, 9-12 |
| | | | | | | AC010292, AC026272, AC011379 | | and its enon 8 is missing 70 bps at the 3 |
| | | | | | | | | end. The protein product does not have |
| | | | | | | | | transmembrane and cytoplasmic tail |
| | | | | | | | | regions |
| Gene847 | NRG2 | neuregulin 2 | NM_013985 | NP_053588 | NT_007018 | AC008667, AC008523, AC011589, | | Splice variant 6 excludes exons 8-12 |
| | | | | | | AC010292, AC026272, AC011379 | | and its exon 7 is missing 3 bps at the 3 |
| | | | | | | | | end. The protein product does not have |
| | | | | | | | | tranumembrane and cytoplasmic tail |
| | | | | | | | | regions |
| Gene891 | NRG1 | neuregulin 1 | NM_004495 | NP_004486 | NT_007995 | AC083977, AC013561, AC128834, | stSG4083, | This variant (HRG-gamma) has a longer |
| | | | | | | AF181895 | SHGC-12780, | 5' UTR and longer 3' UTR than vanant |
| | | | | | | | WI-18803 | HRG-alpha The CDS is truncated on |
| | | | | | | | | the 3' end by 1289 bps resulhng in a |
| | | | | | | | | protein product equivalent to the N- |
| | | | | | | | | terminal 211 amino acids of the HRG- |
| | | | | | | | | alpha isoform. |
| Gene891 | NRG1 | neuregulin 1 | NM_013956 | NP_039250 | NT_007995 | AC083977, AC013561, AF128834, | stSG4083, | This vanant(HRG-betal), along with |
| | | | | | | AF181895 | SHGC-12780, | HRG-alpha, beta2, and beta3 vananits, |
| | | | | | | | WI-18803 | was idenrified in nartous normal tissues |
| | | | | | | | | and cancer cell lines The protein |
| | | | | | | | | product encoded by this vadant is |
| | | | | | | | | distinct from that of HRG-alpha in the |
| | | | | | | | | region of amino acids 213-239 |
| Gene891 | NRG1 | neuregulin 1 | NM_013957 | NP_039251 | NT_007995 | AC083977, AC013561, AF128834, | stSG4083, | This vadant (HRG-beta2), along with |
| | | | | | | AF181895 | SHGC-12780, | HRG-alpha, beta1, and beta3 variants, |
| | | | | | | | WI-18803 | was identified in various normal issues |
| | | | | | | | | and cancer cell lines. The protein |
| | | | | | | | | product encoded by this variant is |
| | | | | | | | | distinct from that of HRG-alpha at the |
| | | | | | | | | region of amino acids 213-231. |
| Gene891 | NRG1 | neuregulin 1 | NM_013958 | NP_039252 | NT_007995 | AC083977, AC013561, AF128834, | stSG4083, | This variant (HRG-beta3), along with |
| | | | | | | AF181895 | SHGC-12780, | HRG-alpha, beta1 and beta2 variants, |
| | | | | | | | WI-18803 | was identified in various normal tissues |
| | | | | | | | | and cancer cell lines. The protein |
| | | | | | | | | product encoded by this variant is 399 |
| | | | | | | | | amino acid shorter than, but the first N- |
| | | | | | | | | terminal 212 amino acids is the same |
| | | | | | | | | as, that of HRG-alpha |
| Gene891 | NRG1 | neuregulin 1 | NM_013959 | NP_039253 | NT_007995 | AC083977, AC013561, AF128834, | stSG4083, | This vanant (SMDF) is expressed mainly |
| | | | | | | AF181895 | SHGC-12780, | in the nervous system. It contains a C- |
| | | | | | | | WI-18803 | terminal EGF-like domain and a unique |
| | | | | | | | | N-terminal sequence which lacks an Ig- |
| | | | | | | | | like domain and is distinct from all |
| | | | | | | | | known HRG-variants |
| Gene891 | NRG1 | neuregulin 1 | NM_013980 | NP_039254 | NT_007995 | AC083977, AC013561, AF128834, | stSG4083, | This variant (ndf43) in one of the HRG- |
| | | | | | | AF181895 | SHGC-12780, | variants It has shorter 5 UTR, shorter |
| | | | | | | | WI-18803 | CDS, and longer 3' UTR than the variant |
| | | | | | | | | HRG-alpha Its amino acid sequence is |
| | | | | | | | | 178 amino acid shorter than, and the |
| | | | | | | | | last C-terminal 38 amino acids differs |
| | | | | | | | | from, that of the variant HRG-alpha. |
| Gene891 | NRG1 | neuregulin 1 | NM_013961 | NP_039255 | NT_007995 | AC083977, AC013561, AF128834, | s1SG4083, | The GGF (also called GGFHFB1) |
| | | | | | | AF161895 | ShIGC-12780, | variant is identical to HRG-beta3 variant, |
| | | | | | | | WI-18603 | except for its shorter 5' and 3' UTRs. |
| | | | | | | | | The GGF and GGF2 vanants are |
| | | | | | | | | expressed in the nervous system and |
| | | | | | | | | function as a neuronal signal that |
| | | | | | | | | promotes the proliferation and survival |
| | | | | | | | | of the oligodendrocyte and the |
| | | | | | | | | myelinating cells. |
| Gene891 | NRG1 | neuregulin 1 | NM_013962 | NP_039256 | NT_007995 | AC083977, AC013561, AF126834, | s1SG4083, | The GGF2 (also called GGFHBS5) |
| | | | | | | AF181895 | SHGC-12760, | variant differs from GGF variant at N- |
| | | | | | | | WI-18803 | terminal coding segments designated 1 |
| | | | | | | | | or 2, and their 5' UTR ate unrelated |
| | | | | | | | | Botrivadants are expressed in the |
| | | | | | | | | nervous system and function as a |
| | | | | | | | | neuronal signal that promotes the |
| | | | | | | | | proliferation and survival of the |
| | | | | | | | | oligodendrocyte and the myalinating |
| | | | | | | | | cell |
| Gene891 | NRG1 | neuregulin 1 | NM_013964 | NP_039258 | NT_007995 | AC083977, AC013561, AF128634, | stSG4083, | This variant (HRG-alpha), along with |
| | | | | | | AF181895 | SHGC-12780, | HRG-betal, beta2, and beta3 variants, |
| | | | | | | | WI-18603 | was identified in vanous normal tissues |
| | | | | | | | | and cancer cell lines. The protein |
| | | | | | | | | product encoded by this variant is |
| | | | | | | | | distinct from those of HRG-beta vanants |
| | | | | | | | | at the region of amino acids 213-234. |
| Gene874 | SH3GL2 | SH3-domain GRB2-like 2 | NM_003026 | NL_003017 | NT_029370 | AL139115 | | SH3-domain GRB2-like 2 |
| | (Endophilin1) | | | | | | | |
| Gene803 | SH3GL1 | SH3-domain GRB2-like 1 | NM_003025 | NP_003016 | NT_011245 | AF190465, AC007292 | | SH3-domain GRB2-like 1 This vanant |
| | (Endophilin2) | | | | | | | (1) has longer exons E and F as |
| | | | | | | | | compared to vanant 2. There are 369 |
| | | | | | | | | amino acids. |
| Gene803 | SH3GL1 | SH3-domain GRB2-like 1 | AK097616 | N/A | NT_011245 | AF190465, AC007292 | | SH3-domain GRB2-like 1 This variant |
| | (Enxophilin2) | | | | | | | (2) has shorter exons E and F as |
| | | | | | | | | compared to vanant 1. This variant is 64 |
| | | | | | | | | amino acids shorter than vanant 1 |
| Gene894 | ADAM3A | a disintegrin and metalloproteinase | X89657 | | no alignment | | | a disintegrin and metalloproteinase |
| | | domain 3a (cyntestin 1) | | | in Draft | | | domain 3a (cyntestin 1) pseudogene |
| | | | | | sequence | | | |
| Gene895 | ADAM28 | a disintegrin and metalloproteinase | NM_014265 | NP_055080 | NT_008130 | AC023202, AC044891 | stSG42867 | This variant (1) encodes isoform 1, |
| | | domain 28 | | | | | | which has the same amino acid length |
| | | | | | | | | as isoform 2 encoded by variant 2 |
| | | | | | | | | These two isoforms differ from each |
| | | | | | | | | other in the next to last amino acid. In |
| | | | | | | | | addition, variant 1 contains a 272 bps |
| | | | | | | | | longer 3' UTR than variant 2. |
| Gene895 | ADAM28 | a disintegrin and metalloproteinase | NM_021777 | NP_068547 | NT_008130 | AC023202, AC044891 | s1tG42867 | This variant (3) contains a shorter 3' |
| | | domain 28 | | | | | | coding region and a different 3' UTR |
| | | | | | | | | from variant 2. The isoform 3 encoded |
| | | | | | | | | by this variant lacks transmembrane and |
| | | | | | | | | cytoplasmic domains, as compared to |
| | | | | | | | | isoform 2 encoded by variant 2 |
| Gene895 | ADAM28 | a disintegrin and metatoproleinase | NM_021778 | NP_068548 | NT_008130 | AC023202, AC044891 | stSG42867 | This variant (2) contains a longer 3' |
| | | domain 28 | | | | | | coding region and different 3' UTR from |
| | | | | | | | | vacant 3 The isoform 2 encoded by this |
| | | | | | | | | variant contains transmembrane and |
| | | | | | | | | cytoplasmic domains, as compared to |
| | | | | | | | | isoform 3 encoded by variant 3. |
| Gene895 | ADAM7 | a disintegrin and metalloproteinase | AF215824 | AAG43987 | NT_023666 | AC024958, AC018422 | | a disintegrin and metalloprotenase |
| | | domain 7 | | | | | | domain 7 |
| Gene897 | ADAM9 | a disintegrin and metalloproteinase | NM_003816 | NP_003807 | no alignment | | D14665, | a disintegris and metalloproteinase |
| | | domain 9 (meltrin gamma) | | | is Draft | | | domain 9 preproprotein |
| | | | | | sequence | | RH25259 | |
| Gene898 | ADAM2 | a disintegrin and metalloproteinase | NM_001464 | NP_001455 | NT_008045 | AF178650, AC018807 | U52370 | a disintegrin and metalloproteinase |
| | | domain 2 (fertilin beta) | | | | | | domain 2 proprotein |
| Gene899 | ADAM18 | a disintegrin and melalloproteinase | NM_014237 | NP_055052 | NT_008045 | AF178650, AC018807 | | a disintegrin and metalloproteinase |
| | | domain 18 | | | | | | domain 18 preproprotein |
| Gene962 | ADAMTS2 | a disinlegrin-like and | NM_014244 | NP_055059 | NT_006802 | AC010216, AC008470, AC008544, | | This variant (1) and variant 2 share |
| | | metalloprolease (reprolysin type) | | | | AC034202, AC023587, AC016557 | | identical 5'-region of 1629 bps, which |
| | | with thrombospondin | | | | | | encodes N-terminal 543 amino acids, |
| | | type 1 motif, 2 | | | | | | but they have diverse 3-region Vanant |
| | | | | | | | | 1 is 1935 bps longer than variant 2 in |
| | | | | | | | | the 3-region, and the isoform 1 encoded |
| | | | | | | | | by variant 1 is 645 amino acids longer |
| | | | | | | | | than isoform 2 encoded by variant 2. |
| | | | | | | | | Isoform 1 contains 4 C-terminal TS |
| | | | | | | | | motifs, whereas isoform 2 lacks C- |
| | | | | | | | | terminal TS mofits. |
| Gene962 | ADAMTS2 | a disintegrin-like and | NM_021599 | NP_067610 | NT_006802 | AC010216, | | This variant (2) and variant 1 share |
| | | melalloprotease (reprolysin type) | | | | AC008470, | | identical 5'-region of 1629 bps, which |
| | | with thrombospondin | | | | AC008544, | | encodes N-terminal 543 amino acids, |
| | | type 1 motif, 2 | | | | AC034202, | | but they have diverse 3-region Vanant |
| | | | | | | AC023587, | | is 1935 bps shorter than variant 1 in |
| | | | | | | AC0165572 | | the 3-region, and the isoform 2 encoded |
| | | | | | | | | by variant 2 is 645 amino acids shorter |
| | | | | | | | | than isoform 1 encoded by variant 1 |
| | | | | | | | | Isoform 2 lacks C-terminal TS motifs, |
| | | | | | | | | whereas isoform 1 contains 4 C-terminal |
| | | | | | | | | TS motifs Variant 2 is resulted from |
| | | | | | | | | retention of a portion of an intron and |
| | | | | | | | | the use of a polyA signal which is |
| | | | | | | | | located within the intron sequence. |
| Gene901 | ADAMTS3 | a disintegrin-like and | XM_036683 | XP_036683 | NT_022833 | AC011819, | A009A40, | a disintegrin-like and melalloprotease |
| | | metalloprotease (reprolysin type) | | | | AC055844, | stSG39575, | (reprolysin type) with thrombospondin |
| | | with thrombospondin | | | | AC022843, | SHGC-50515 | type 1 motif, 3 |
| | | type 1 motif, 3 | | | | AC088203 | | |
| Gene902 | ADAMTS9 | a disintegrin-like and | NM_020249 | NP_084834 | no alignment | | | a disintegrin and metalloproteinase with |
| | | metalloprolease (reprolysin type) | | | in Draft | | | thrombospondin motifs-9 preproprotein |
| | | with thrombospondin | | | sequence | | | |
| | | type 1 motif, 9 | | | | | | |
| Gene903 | ADAMDEC1 | ADAM-like, decysin 1 | NM_014479 | NP_055294 | NT_023666 | AC024958 | | ADAM-like, decysin 1 a disintegrin |
| | | | | | | | | protease |

### Example 5

[0330] Mutation Analysis

[0331] Gene 803, Gene 845, Gene 847, Gene 874 and Gene 962 disorder-associated candidate genes were identified using the above procedures, and exons from these genes were subjected to mutation detection analysis. A combination of fluorescent single stranded confirmation (SSCP) analysis (ABI), DNA sequencing, and other sequence analysis methods described herein were utilized to precisely identify and determine nucleotide sequence variants. SSCP analysis was used to screen individual DNA sequences for variants. Briefly, PCR was used to generate templates from unrelated asthmatic individuals. Non-asthmatic individuals were used as controls. Enzymatic amplification of the disorder-associated genes was accomplished using primers flanking each exon and the putative 5′ regulatory elements of each gene. The primers were designed to amplify each exon, as well as 15 or more base pairs of each intron on either side of the splice site. The forward and the reverse primers had two different dye colors to allow analysis of each strand, and independent confirmation of variants. PCR reactions were optimized for each exon primer pair. Buffer and cycling conditions were specific to each primer set. PCR products were denatured using a formamide dye, and electrophoresed on non-denaturing acrylamide gels with varying concentrations of glycerol (at least two different glycerol concentrations).

[0332] Primers utilized in fluorescent SSCP experiments to screen coding and non-coding regions of Gene 803, Gene 845, Gene 847, Gene 874 and Gene 962 for polymorphisms are provided in Table 3. The first column list the genes targeted for mutation analysis. The second column list the specific exons analyzed. The assigned primer names are described in the third column. The fourth and fifth columns list the forward primer sequences and the reverse primer sequences, respectively. The genes listed in the first column of Table 3 correspond to the gene identifiers in the first column of Table 2.

TABLE 3
SSCP PRIMERS

| Gene | Exon | SSCP Assay | Forward Sequence | Reverse Sequence |
|---|---|---|---|---|
| 845 | B | 1792_845_B_F_1793_845_B_R | GGAGCGTCTCGACAGAGG | AAGGCTACTCCCAGGTCTCC |
| 845 | C | 1794_845_C_F_1795_845_C_R | CTGGGATTCCAATGGTTTTG | AGAGTGGGCCAGAAACAGAA |
| 845 | D | 1796_845_D_F_1797_845_D_R | TCCTGTGGATCAATGTTGGA | CTTCCTTCCAGAACAGCGAC |
| 845 | E | 1798_845_E_F_1799_845_E_R | GTTGTTGCTAGGAGGGTGGA | TCCCTTCAGAGGAGAGACCA |
| 845 | F | 1800_845_F_F_1801_845_F_R | CATCCATGACCATCCTGAGA | TTGAAACTTCCATTCCTGGG |
| 845 | G | 1802_845_G_F_1803_845_G_R | CTAAGACCTACACAAGGGACTTTT | CAGGTTGATTTCTGCACTGAG |
| 845 | H | 1804_845_H_F_1805_845_H_R | CGGAGGTAGCTGCTGCTTAT | AACATTTCCCCAAAGCAGTCT |
| 845 | I | 1806_845_I_F_1807_845_I_R | CAAGACAAGTAATGGGGCG | GGCACCTTTCCCACAAGTA |
| 845 | J | 1808_845_J_F_1809_845_J_R | ATCCCAGGTGGTATTGACAGA | CAGCCAAGGACAACACAACA |
| 845 | K | 1810_845_K_F_1811_845_K_R | CCACTTACTCCCAGGCACAT | CTGGTCTTGAAAGGCAGCTC |
| 845 | L | 1842_845_L_F_1813_845_L_R | GTCCCCTTGACCTTGACCTC | AACCCCTGGGTCACACTGTC |
| 845 | M | 1814_845_M_F_1815_845_M_R | AGGAGTGACAGCACGAGTGA | CAAATTCTTCCCCTCCCACT |
| 845 | N | 1816_845_N_F_1817_845_N_R | TTGCTAGAGAGCTGGGGTTC | AGTCCTGTGGTCCCACTGTC |
| 845 | O | 1818_845_O_F_1819_845_O_R | TGGGGAGGAGATTGACTGTG | CAAAACTACCCTGAGGGCCA |
| 845 | P | 1820_845_P_F_1821_845_P_R | GGGGCTTCTGACAGATGAGT | AGTTGGGCAACAGTGAGGAC |
| 845 | Q | 1822_845_Q_F_1823_845_Q_R | GACTGAAGCTCTCTGGTGCC | CTCCTCAGGACCTCGGTAGA |
| 845 | Q | 1824_845_Q_F_1825_845_Q_R | TGCCCATTGACACCACTATC | CATCCTTCCCTCAGACCTCA |
| 845 | R | 1826_845_R_F_1827_845_R_R | TCTTGCCTCCTAACTCCCAA | GACCTGGAGCAAAGAAAGGG |
| 845 | S | 1828_845_S_F_1829_845_S_R | CTGGGTTCTGGCTTCTCTGT | CTCACAAAAGCGGGCAGT |
| 845 | T | 1830_845_T_F_1831_845_T_R | AAATCTGCTGTAGCCGAGACA | TGGAGACCTTTGTGACCCAT |
| 845 | U | 1832_845_U_F_1833_845_U_R | ACTGTCCCCTGCTGAACATC | AAATACAGCATGGCCCTGAG |
| 845 | V | 1834_845_V_F_1835_845_V_R | CCCTTTGGGCTCTGGTTTAT | GGACGACTCCGTCCTCTCTA |
| 845 | V | 1836_845_V_F_1837_845_V_R | GATTATCTGCGTGGTGGGTC | AGTTTCACCTTCCCCACCTT |
| 845 | W | 1838_845_W_F_1839_845_W_R | TCTTTCAAACAGGCCTCTGG | ACCAGCTTTCACCTTGAGGG |
| 845 | X | 1840_845_X_F_1841_845_X_R | TGATCCCATTGATCAGCATC | TTTGGAGATGTGGAGGTTCC |
| 847 | A | 1925_847_A_F_1926_847_A_R | CTGTTTCCGGTTTTCCAGC | GACGAGAGATGCTGCTGTTG |
| 847 | A | 2009_847_A_F_2010_847_A_R | CAGGAGCAGCAGCAACAA | TGGTCCTGCACTGACTTGAG |
| 847 | A | 1929_847_A_F_1930_847_A_R | GGCTTCTCCATGCTGCTCT | CCACGCTGATCACCTGCT |
| 847 | A | 1931_847_A_F_1932_847_A_R | TAAAGGTGCTGGACAAGTGG | CCTTTCTCCAGCAAAGGGA |
| 847 | B | 1903_847_B_F_1904_847_B_R | ACCACCGTGCTCACCTACCT | AGCTGCTTGGATGGAGGAC |
| 847 | C | 1905_847_C_F_1906_847_C_R | CTCTGTGGAGAGAGGCMCC | CAACCCCTCTAGGACCCTT |
| 847 | D | 1907_847_D_F_1908_847_O_R | GGGGCCTAGGGATAGTCTCA | CTACCCTGTTCTTGCTCCCA |
| 847 | E | 1909_847_E_F_1910_847_E_R | CCAAGTGCCTGACTTGGTTT | GGAGCAGGGACTTGTGTTTG |
| 847 | F | 1911_847_F_F_1912_847_F_R | TCCTGGCTCTCTCUTCTGG | CTCTAAGGAGCGCAGGACAC |
| 847 | G | 1913_847_G_F_1914_847_G_R | CTAACCTGCTTTCACCTCGC | CATTCAGCACACATGGCATC |
| 847 | H | 1915_847_H_F_1916_847_H_R | AAGGGGTCTCTGCACCACTA | ACATTCTTGGAGGCCCATC |
| 847 | I | 1917_847_I_F_1918_847_I_R | TAGGGAAGTTCATCGTTGGC | AGAAGGCTGGCTGTCCACT |
| 847 | J | 1919_847_J_F_1920_847_J_R | CCTGTCCCCAACAAGAAAGA | TTTGCGCCAGATGAAGTATG |
| 847 | K | 1921_847_K_F_1922_847_K_R | GAGCTCGAGGTGGAAGAAGA | CTCCTCCAGGTTGTAGGCTG |
| 847 | K | 1923_847_K_F_1924_847_K_R | TCATCAGTGGGTACCAGCPA | TTTGGAGTGTTTCTGAGGGG |
| 847 | L | 2030_847_L_F_2031_847_L_R | CCACCCTATCACGATTCCGT | GCAGTAACGGCTGCTGCTC |
| 847 | L | 1933_847_L_F_1934_847_L_R | GTACGTGTCGGCCCTGA | ATAGCTGCGCTGCATGTCT |
| 847 | L | 1935_847_L_F_1936_847_L_R | CCCATCAGTTACCGCCTG | CTCCTGCGTGGTCTCGTACT |
| 847 | L | 1937_847_L_F_1938_847_L_R | GTACGAGACCACGCAGGAGT | TCAGCGACAGCGAGTCC |
| 847 | L | 1939_847_L_F_1940_847_L_R | GTAGACCACGCAGGAGT | CCCAGGAAAGGTGTGCTCT |
| 847 | L | 1941_847_L_F_1942_847_L_R | GGACTCGCTGTCGCTGAG | GCTGTGGCTGTCCAGTGAGTA |
| 847 | L | 1943_847_L_F_1944_847_L_R | AGAGCACACCTTTCCTGGG | CTCCTTAAAGATAGTGGGGCG |
| 803 | B | 2052_803_B_F_2053_803_B_R | GTGGCGGGGCTGAAGAAG | CCCTTGGTCTTCCCACCTG |
| 803 | C | 2054_803_C_F_2055_803_C_R | GTGTCCTGATCACTTGGCCT | AGTGCCACCACCACACAGA |
| 803 | D | 2056_803_D_F_2057_803_D_R | CCTGGTATGGGCTCTTAGGG | GTTCTGTCATCCCCTGCCT |
| 803 | E | 2058_803_E_F_2059_803_E_R | AAGGGTGGGGAGGAGATGT | CAGAGAGCACCACTCACCAA |
| 803 | E | 2060_803_E_F_2061_803_E_R | TCTGGGCGAGTGCATGAT | TTGGTCTGTGCAGTCTCCTG |
| 803 | F | 2062_803_F_F_2063_803_F_R | AGGCCCGGTATGATGGCTT | GAGGTGAGGGTGGCAGGAAT |
| 803 | G | 2064_803_G_F_2065_803_G_R | CGCTACTGGTGTGACCCAT | CCCAAGGGCATAGGTCTTCT |
| 803 | H | 2066_803_H_F_2067_803_H_R | AGGGAAGGCACAGGACAGT | CATGTGCTCACCCCACAG |
| 803 | I | 2068_803_I_F_2069_803_I_R | AAATACAAGAGTGGGGCTGC | CATTTGCCTCCGCAAGAG |
| 803 | J | 2070_803_J_F_2071_803_J_R | ACCGTTTTGAGCCCACAG | GCTTGAGATGGGCAGAGAAC |
| 803 | K | 2072_803_K_F_2073_803_K_R | CAGGTCACAGCAGGTCTGAG | GGACACGGGTGAGTCACTG |
| 803 | K | 2074_803_K_F_2075_803_K_R | AGCTACGTGGAGGTGCTTGT | TGGGAGTCAGCGCTAGTGTA |

[0333] Comparative DNA sequencing was used to determine the sequence changes in Gene 803, Gene 845, Gene 847, Gene 874 and Gene 962. Variants detected by SSCP analysis in the initial set of asthmatic and normal individuals were analyzed by fluorescent sequencing on an ABI 377 automated sequencer (Perkin-Elmer Applied Biosystems Division). Sequencing was performed using Amersham Energy Transfer Dye Primer chemistry (Amersham-Pharmacia Biotech) following the standard protocol described by the manufacturer. Primers used for dye primer sequencing are shown in Table 4. The first column lists the genes targeted for sequencing. The second column list the specific exons sequenced. The third and fourth list the forward primer names and the forward primer sequences, respectively. The fifth and sixth columns list the reverse primer names and reverse primer sequences, respectively.

TABLE 4
SEQUENCING PRIMERS

| Gene | Exon | Forward Primer | Forward Sequence | Reverse Primer | Reverse Sequence |
|---|---|---|---|---|---|
| 803 | B | MDSeq_523_803_B_F | TCCCGCGGTAGACAATG | MDSeq_523_803_B_R | GAGAAGGAGGGGAGAGGTC |
| 803 | B | MDSeq_540_803_B_B_F | AGGGTCACCTCCACGACTC | MDSeq_540_803_B_R | CCCTTGGTCTTCCCACCT |
| 803 | B | MDSeq_575_803_B_F | AACTCACTGACAGAGGCGG | MDSeq_575_803_B_R | GTCCCTTGGTCTTCGCACC |
| 803 | B | MDSeq_659_803_B_F | TGTGCACGTGCGCTCTTC | MDSeq_659_803_B_R | GTCCCFrGGTCTTCCCACCT |
| 803 | B | MDSeq_660_803_B_F | GCTGAACACTTAGACGAAOTGGATT | MDSeq_660_803_B_R | GGCACACACGTATCTTAGGAAAG |
| 803 | E | MDSeq_510_803_E_F | CTGAGGAGCTTGGTCACCTC | MDSeq_510_803_E_R | GTTTGCCCTTAACAGGTGGA |
| 803 | F | MDSeq_511_803_F_F | GGAAAGGATCCAGGTGTG | MDSeq_511_803_F_R | CTCCAGTTTCTTCAGGTGG |
| 803 | G | MDSeq_512_803_G_F | CTGAAGGAGATCCAGGTGCT | MDSeq_512_803_G_R | CTGTCCTGTGCCTTCCCT |
| 803 | H | MDSeq_513_803_H_F | ATGCACAACCTCCTGGAGAC | MDSeq_513_803_H_R | GGCTGGGTGTTGACTGAGA |
| 803 | I | MDSeq_514_803_I_F | CCCAGTCTAGCTGTGTCCC | MDSeq_514_803_I_R | TGTCGGAAGATCGGAAGAC |
| 803 | K | MDSeq_515_803_K_F | CCAAGCTTCTCCCATCCT | MDSeq_515_803_K_R | CTCAGGGAGTACCTGAAGGG |
| 845 | D | MDSeq_426_845_D_F | CCAGTGTTTCCCTTCACC | MDSeq_426_845_D_R | CCAGCAATCTCACATCGAG |
| 845 | E | MDSeq_433_845_E_F | GGAGTGATGTTCCCATAGTG | MDSeq_433_845_E_R | ATGTGGGTAATTACATAAAGCAA |
| 845 | F | MDSeq_442_845_F_F | AATGACATCTTCCCTGCCC | MDSeq_442_845_F_R | ATGGCAGTCATCTCCTGA |
| 845 | H | MDSeq_427_845_H_F | CTCCAGCAATAACCAAATG | MDSeq_427_845_H_R | TGCTACTGCCACAGCCT |
| 845 | H | MDSeq_504845_H_F | TAGCATGGGTAAGGCGTG | MDSeq_504_845_H_R | GCCTTCTCTGCTCACTCCAC |
| 845 | I | MDSeq_428_845_I_F | CAAGGGTTAGAGGAAGGCA | MDSeq_428_845_I_R | CGTAGTTCAGGGCTCTGTCA |
| 845 | J | MDSeq_436_845_J_F | GTTGCCTCCTTCTGTTGGA | MDSeq_436_845_J_R | TGGGTACAGAGCGCATGTT |
| 845 | K | MDSeq_429_845_K_F | CCAAGGAATCAGCTATGGG | MDSeq_429_845_K_R | CTTCAGGGTTCCTGAGCTTG |
| 845 | O | MDSeq_443_845_O_F | TGAGAAGGCTGAAGGTG | MDSeq_443_845_O_R | CTTAGGGCCATTTGCATT |
| 845 | P | MDSeq_430_845_P_F | GTTGAGAATATGGGGATGGA | MDSeq_430_845_P_R | GAAATGACCCAAAAGGGCT |
| 845 | R | MDSeq_432_845_R_F | ACAGACACAGGCCACCAG | MDSeq_432_845_R_R | TGTGGATGCTCTGCAACA |
| 845 | U | MDSeq_444_845_U_F | GGCCAACTCTGTTTCCTTGA | MDSeq_444_845_U_R | ATGGTGGTGGGCACCTG |
| 845 | V | MDSeq_437_845_V_F | CTAAGAGCCTCTGTGGGC | MDSeq_437_845_V_R | GTTGCTCTAACCTGCTGTG |
| 845 | W | MDSeq_445_845_W_F | CAGCTTGCTCTCCTGACTT | MDSeq_445_845_W_R | GGGCACCPAGAAACATGAAT |
| 845 | X | MDSeq_446_845_X_F | GGCTGACCATGCTGTATTC | MDSeq_446_845_X_R | GAGGAGAAGCTGCCAGTCAC |
| 847 | A | MDSeq_438_847_A_F | GCATCCTCCTCCAGGTCC | MDSeq_438_847_A_R | GTACCTTGCCCTCCACCAC |
| 847 | A | MDSeq_457_847_A_F | AACAGCAGCATCTCTCGTC | MDSeq_457_847_A_R | CCATTCTCCACCACCTCG |
| 847 | A | MDSeq_475_847_A_F | GCATCCTCCTCCAGGTCC | MDSeq_475_847_A_R | GTACCTTGCCCTCCACCAC |
| 847 | B | MDSeq_439_847_B_F | GGCATGAAGGAAACTCTCCA | MDSeq_439_847_B_R | GGGTCTTCCACTGATCAAGC |
| 847 | C | MDSeq_465_847_C_F | GGACATGTGAGCAGCCACTA | MDSeq_465_847_C_R | TTCCAGGCCCAGATAACAA |
| 847 | D | MDSeq_466_847_D_F | GGTTGCACTGGGTAAACG | MDSeq_466_847_D_R | CCTAAAGGGTGTTGGTGAA |
| 847 | E | MDSeq_447_847_E_F | TTTCCCATCTTCCCTCACC | MDSeq_447_847_E_R | ACCTGCAGCCCTGAACTTT |
| 847 | F | MDSeq_467_847_F_F | GTTCAGGGCTGCAGGTAA | MDSeq_467_847_F_R | AGACCCTTTGGTACCCTCA |
| 847 | G | MDSeq_478_847_G_F | TCTCTAAAGAGCCTGCCCTG | MDSeq_478_847_G_R | GCCCTTCTGTTCATGAGCTT |
| 847 | H | MDSeq_468_847_H_F | CCACTCATGTGCTCTGG | MDSeq_468_847_H_R | CCATTCTTCGTCAGTGCC |
| 847 | I | MDSeq_479_847_I_F | GCTTGAGTACAGGGACGAGC | MDSeq_479_847_I_R | CATGGAAGTGAGCAAACCA |
| 847 | J | MDSeq_454_847_J_F | GGTTTGCTCACTTCCATGA | MDSeq_454_847_J_R | GTCTGAGCCTTTGTGCTG |
| 847 | K | MDSeq_448_847_K_F | CAGCCCTCCTTCTTCCAATA | MDSeq_448_847_K_R | ACTGGCCCAACTCTAGTCC |
| 847 | L | MDSeq_450_847_L_F | TCGAAGATCCTGAGCGAGT | MDSeq_450_847_L_R | GGTCACTCCTCCCTCTGC |
| 847 | L | MDSeq_451_847_L_F | CCCATTTATCAGTGGTTGC | MDSeq_451_847_L_R | CTACCCCTTCCCGGCTC |
| 847 | L | MDSeq_461_847_L_F | GACTTCCACTACTCGOTGGC | MDSeq_461_847_L_R | CCAGGAAAGGTGTGCTCT |
| 847 | L | MDSeq_469_847_L_F | GACAGCTACTATTACCCCGC | MDSeq_469_847_L_R | CGCCTTTGCCGTTAG |
| 847 | L | MDSeq_501_847_L_F | GCCTGACTTCTGACTCCCA | MDSeq_501_847_L_R | TCCTGCGTGGTCTCGTACT |
| 847 | L | MDSeq_502_847_L_F | GCGCAGCTATGACAGCTACTA | MDSeq_502_847_L_R | GGTCTCCTTAAAGATAGTGGG |
| 847 | L | MDSeq_503_847_L_F | GGACTCGCTGTCGCTGAG | MDSeq_503_847_L_R | CCGAAGGTGTAAATCAGGA |
| 847 | L | MDSeq_516_847_L_F | CCACAGACCATGTCATCAGG | MDSeq_516_847_L_R | CCGAAGCTGTAAATCAGGA |
| 874 | R | MDSeq_592_874_R_F | GGCCCGCTGACTAGGGAT | MDSeq_592_874_R_R | GCGCTACCAGGCAGGAC |
| 874 | S | MDSeq_615_874_S_F | CAGACCCTCAGAGCCACA | MDSeq_615_874_S_R | CATCGTGACCTTTCACCTTCA |
| 874 | T | MDSeq_616_874_T_F | GGATAAACGGGCTTTCCACA | MDSeq_616_874_T_R | TGTGTCACCTGAACTGTTTGC |
| 874 | T | MDSeq_681_874_T_F | GGATAAACGGGCTTTCCACA | MDSeq_681_874_T_R | TGTGTCACCTGAACTGTTTGC |
| 874 | T | MDSeq_701_874_T_F | CCTCACCTACTGCGGGACTT | MDSeq_701_874_T_R | GTGGACCGAGGAAGCAA |
| 874 | U | MDSeq_617_874_U_F | ACAGTGAAGGGAGGATGGG | MDSeq_617_874_U_R | GGCCCATGTGTGTAGGA |
| 874 | V | MDSeq_618_874_V_F | ACAAGAGAGGGCAGGGAGC | MDSeq_618_874_V_R | AACGTGCCCAGAGCTGAC |
| 874 | W | MDSeq_619_874_W_F | AGCCTTTGMAGCACTGGC | MDSeq_619_874_W_R | CCCATCATAAGTTAAGGAGCATCTG |
| 874 | X | MDSeq_620_874_X_F | CACAGTCATCAGCACCACCA | MDSeq_620_874_X_R | CGCCTCTGTAGGATMGCGG |
| 874 | Y | MDSeq_621_874_Y_F | GATTTCCCACACTTCATCATGG | MDSeq_621_874_Y_R | GCAGACCAAACTGACAAGG |
| 874 | Z | MDSeq_622_874_Z_F | GCAAGTCACGGTCAGACTGG | MDSeq_622_874_Z_R | GCCCACCAGGCTAAGAGGAT |
| 874 | Z | MDSeq_682_874_Z_F | AACAGGAAGAGGPATGAGGG | MDSeq_682_874_Z_R | CCATGACTCCTGTGGGAGC |
| 962 | D | MDSeq_858_962_D_F | TCGCTCCTTCCCTCTCCC | MDSeq_858_962_D_R | GACTCAGGAGCCGCCAGT |
| 962 | E | MDSeq_859_962_E_F | GAGGTGCAGGCTGGCTTCT | MDSeq_859_962_E_R | CGACGTAGAGACAGCTCCC |
| 962 | E | MDSeq_860_962_E_F | CGTGGTGTCGGCAGCTA | MDSeq_860_962_E_R | GGAGCACGAGGCTCACTAA |
| 962 | F | MDSeq_861_962_F_F | CTCTGGGACCACATGTTCA | MDSeq_861_962_F_R | CTGAGCCACTGAGACCG |
| 962 | G | MDSeq_862_962_G_F | TTCCTCTGCACCTCGCTTT | MDSeq_862_962_G_R | CACTCACOTCCGGCTAACA |
| 962 | H | MDSeq_863_962_H_F | AGTTGATGGTGACGCCTGG | MDSeq_863_962_H_R | CCGTGGCCTGGTATGTCTCT |
| 962 | I | MDSeq_864_962_I_F | CCTGTCAAAGACTGGAGCCC | MDSeq_864_962_I_R | CCACACCCTCACCCAGCTA |
| 962 | J | MDSeq_865_962_J_F | CTGCTGTCAGCCAGATGTC | MDSeq_865_962_J_R | GGGAAGACAGGAGACCACA |
| 962 | K | MDSeq_866_962_K_F | AGCAGGTAGATGGTCGGTG | MDSeq_866_962_K_R | CAGGTGTGCCCTOTCTCCTC |
| 962 | L | MDSeq_867_962_L_F | TGCAGCAGGGAAACTGAGG | MDSeq_867_962_L_R | CCTGCCTAGGACCACGTCT |
| 962 | M | MDSeq_868_962_M_F | CACCGTATGGGCMGGTCT | MDSeq_868_962_M_R | GGTGTGCTCCAGCATCAGA |
| 962 | N | MDSeq_869_962_N_F | GGCGGAGCTTCTGAAAGAAA | MDSeq_869_962_N_R | CCGAATGGTGCAC1TCACTT |
| 962 | O | MDSeq_870_962_O_F | GCCAATGAGGCCTGTCTTCT | MDSeq_870_962_O_R | CCTGCACCTCTCCAGAACT |
| 962 | O | MDSeq_907_962_O_F | GCATCTAGGGGCGAGGAG | MDSeq_907_962_O_R | TCCCAGGTAGGGTGAGGC |
| 962 | P | MDSeq_871_962_P_F | GCTCAGCAGAGCTGCCC | MDSec_871_962_P_R | GCCCTGCTAGGAACTTTAATGC |
| 962 | Q | MDSeq_872_962_Q_F | TTTCCCTCTCTGTCTGCCC | MDSeq_872_962_O_R | GTCTCAGGCTCCCAGCAC |
| 962 | R | MDSeq_873_962_R_F | GATGAGGCCAGGCAAGGT | MDSeq_873_962_R_R | CCGACTTAGGATTCTCCCTCC |
| 962 | S | MDSeq_874_962_S_F | GTGGGTCCTCAAAGCCAGAG | MDSeq_874_962_S_R | GCTGAGCAGAGGGACAGGTT |
| 962 | T | MDSeq_875_962_T_F | GTCGTGGCACAGAGGAAAC | MDSeq_875_962_T_R | TGTCCCTTCCTGGCTGTGA |
| 962 | U | MDSeq_876_962_U_F | GCTCACAGGAACCTCACCCT | MDSeq_876_962_U_R | GGTCCCTGCTGTGGCT |
| 962 | V | MDSeq_877_962_V_F | CCTGCCACCCTTATTGT | MDSeq_877_962_V_R | CTGCCCTGCAGCATCTTA |
| 962 | W | MDSeq_878_962_W_F | TAAGAGAAGGTGCACCGGG | MDSeq_878_962_W_R | GTCATTGCAGTGCTTGGCAT |
| 962 | W | MDSeq_908_962_W_F | GGTTCTCCAGGTGCTGCG | MDSeq_908_962_W_R | GCCAATGATCAGGGCAGAG |
| 962 | X | MDSeq_879_962_X_F | AGAGAGACAGGCATGTGGG | MDSeq_879_962_X_R | CGCTTCTCCATGCTCACAGA |
| 962 | Z | MDSeq_880_962_Y_F | CAGCGGAGGACCCTTTGTC | MDSeq_880_962_Y_R | CCACGACAGATCTTTGCCC |
| 962 | Z | MDSeq_881_962_Z_F | CTTTCTGCCTGGGCTCACTT | MDSeq_881_962_Z_R | GATTAGGTTGGGTGGCTGGA |
| 962 | Z | MDSeq_882_962_Z_F | GCTGTGCTGCAAGTCCTG | MDSeq_882_962_Z_R | GTATTTGGTCGCTCCTGGG |

[0334] Single nucleotide polymorphisms (SNPs) that were identified in Gene 803, Gene 845, Gene 847, Gene 874 and Gene 962 are shown in Table 5. The first and second columns list SNP identifier and gene names, respectively. The third column lists the exons that either contain the SNPs or are flanked by intronic sequences that contain the SNPs. The fourth column lists the PMP sites for the SNPs. The “−” symbols denote polymorphisms which are 5′ of the exon and are within the intronic region. The “−” polymorphisms are numbered going from the 3′ to 5′ direction. The “+” symbols denote polymorphisms which are 3′ of the exon and are within the intronic region. The “+” polymorphisms are numbered going from the 5′ to 3′ direction. The second, third, and fourth columns, combined, correspond to the SNP names as described herein, e.g., 845_D_{—}+1, 845_D_{—}−1 etc. It should be noted that the disclosed SNPs are referred to herein using both short (e.g., SNP D+1 of Gene 845 or 845_D+1) and long (e.g., Gene 845 D+1) nomenclature. The fifth column lists the localization of the SNPs to exon, intron, or UTR sequences. The sixth column lists the SNP reference sequences and illustrates the SNP nucleotide changes in boldface. The seventh column lists the base changes of the SNP sequences. If applicable, the eighth column lists the amino acid changes resulting from the SNP sequences. The coordinates of the SNP as it corresponds to the genomic sequence are contained in the ninth and ten columns. More particularly, the ninth lists the coordinate of the particular SNP in relation to the single genomic contig reference sequence. The genomic contigs used to create the reference sequence are listed in the tenth column of Tables 5. The genomic sequences and contig sequences with their respective accession numbers are listed in Table 2 and provided in SEQ ID. NOs. 1-9. Column eleven lists the coordinates of the SNP as it corresponds to the genomic contig and sequence listed in column 10. The SNPs identified in the cDNA contain a coordinate listed in the twelfth column. In some instances, alternate splice variants for Gene 803, Gene 847 and Gene 962 contain different coordinates for each. Thus, the respective SNP and coordinate for each splice variant is noted in Table 5. In addition, FIGS. 1-12 show the respective cDNA sequence and SNP location relating to Table 5. One skilled in the art could also take the reference sequence listed in column 6 in Table 5 and compare to the related sequence described in Table 2 using the appropriate Accession number. For example, one could use the program BLAST or ClustalW to perform an alignment and comparison to identify the specific location. One could identify the location of exonic SNPs using FIGS. 1-12 to locate the particular SNP location in the genes and proteins provided herein. One could identify the location of intronic SNPs using the relevant SEQ ID NO: 1-9 and the appropriate coordinates from column 9 of Table 5. For example, to find the location of SNP 803 E+1, one could look at SEQ ID NO:1 at the position indicated by Table 5, in this case coordinate 276365. Alternatively, one could use the coordinate given in column 11 of Table 5 and the appropriate sequence from Table 2 to find the location of a particular SNP.

[0335] SEQ ID NOs: 1-9 contain the genomic sequence of Gene 803, Gene 845, Gene 847, Gene 874 and Gene 962. The corresponding accession numbers for these sequences are located within Table 2. SEQ ID NO: 1 contains the genomic sequence of Gene 803. SEQ ID NOs: 2-5 taken together contain the genomic sequence of Gene 845. SEQ ID NOs: 6 and 7 taken together contain the genomic sequence of Gene 847. SEQ ID NO: 8 contains the genomic sequence of Gene 874. SEQ ID NO: 9 contains the genomic sequence of Gene 962.

[0336] FIGS. 1-12 contain the cDNA and protein sequences with the corresponding SNP locations boldfaced and underlined for Gene 803, Gene 845, Gene 847, Gene 874 and Gene 962. FIGS. 1 and 2 contain the cDNA sequence and protein for two alternate splice variants of Gene 803. FIG. 3 contains the cDNA sequence and protein of Gene 845. FIGS. 4-9 contain the six alternate splice variants of Gene 847. FIG. 10 contains the cDNA and protein sequence of Gene 874. FIGS. 11 and 12 contain the cDNA and protein sequence of two alternate splice variants of Gene 962. Table 2 also contains the corresponding accession numbers to the cDNA and protein sequences relating to FIGS. 1-12.

TABLE 5
Gene SNPs

| | | | | | | | | Single | | | |
|---|---|---|---|---|---|---|---|---|---|---|---|
| | | | | | | | | contig | | | |
| | | | PMP | | | | AA | Genomic | | Genomic | |
| SNP | Gene | Exon | Site | Location | Sequence | PMP | change | coord | Contig used for coords | Coord | cDNA coord |
| 1 | 803 | E | +1 | intron | CAGGGCAGGTCCAGGCCCTGCATGTGCTGAGTGCCGGGGAC | C>T | N/A | 276365 | R31167 AC007292 R/C | 11130 | |
| 2 | 803 | E | +2 | intron | AGGGCAGGTCCAGGCCCTGCATGTGCTGAGTGCCGGGGACG | M>G | N/A | 276366 | R31167 | 11131 | |
| 3 | 803 | H | −1 | intron | GGCCCCAGTCCCCTGTCCCCTCTCAGCCCCCTTGCCTCCTG | TC | N/A | 278195 | R31167 | 12960-12961 | |
| | | | | | | del | | | | | |
| 4 | 803 | H | +1 | intron | GCAAGTGGGCAGCACACCTCGCTGTGGGGTGAGCACATGGC | G>A | N/A | 278474 | R31167 | 13239 | |
| 5 | 803 | I | −1 | intron | AGAGTGGGGCTGCCTCGGCCGTGACACGGGCTCGGTCCACT | G>C | N/A | 278990 | R31167 | 13755 | |
| 6 | 803 | I | 1 | Exon | CCTAAGCGGGAGTATAAGCCCAAGCCCCGGGAGCCCTTTGA | C>G | None | 279072 | R31167 | 13837 | 965(v1):629(v2) |
| 7 | 803 | K | 1 | Exon | GAGCTGGGCTTCCATGAGGGCGAOGTCATCACGCTGACCAA | C>T | None | 280049 | R31167 | 14814 | 1184(v1),848(v2) |
| 8 | 803 | K | 2 | Exon | GGTACGAGGGCATGCTGGACGGCCAGTCGGGCTTCTTCCCG | G>A | Gly>Ser | 280107 | R31167 | 14872 | 1242(v1),906(v2) |
| 9 | 803 | K | 3 | Exon | GACGGCCAGTCGGGCTTCTTCCCGCTCAGCTACGTGGAGGT | C>T | None | 280124 | R31167 | 14889 | 1259(v1),923(v2) |
| 10 | 845 | D | +1 | intron | ATAACTTCTGTGTCAACGCCAGACGCAGGTGTCGCTGTTCT | A>G | | N/A | 6E24AC008694 | 11667 | |
| 11 | 845 | D | −1 | intron | GTGCTAGATCCTGTGCCCGACCCAGGGAGCCTGGTGCCGGC | C>T | | N/A | 6E24AC008694 R/C | 11484 | |
| 12 | 845 | D | 1 | Exon | GTTGTTGCTTTGAGCATCCACTCAAAGCTGAGCTCAGGGTA | C>T | Leu>Phe | N/A | 6E24AC008694 R/C | 11547 | 264 |
| 13 | 845 | F | +1 | intron | CTGAGGCTGCAGGTGGCACCGGGCACTCTCCCCAGGAATGG | G>T | | N/A | 47B1136AC008676 | 5389 | |
| 14 | 845 | F | +2 | intron | GTTTCAAGATAGACAAGGCTGAGGCAAGGACCTTGGGAAGG | G>A | | N/A | 47B1136AC008676 | 5432 | |
| 15 | 845 | G | +1 | intron | AGAAATCAACCTGGGGACAGGCGGTCCCCTCTGAGGTTGC | G>T | | N/A | 47B1136AC008676 | 16370 | |
| 16 | 845 | H | +1 | intron | GCTCACGCCTGTAATCCCAGCAC1TTGGGTGGGCAAGGCGG | C>G | | N/A | 47B1136AC008676 | 17516 | |
| 17 | 845 | H | +2 | intron | TTTGGGTGGGCPAGGCGGGTGGATCACCTGAGGTCAGGAGT | G>A | | N/A | 4761136AC008676 | 17539 | |
| 18 | 845 | H | −1 | intron | GGAAGGTGTTATATGAGTGATGGCCACCACAGCCAAGAACA | T>C | | N/A | 47811.36 AC008676 | 17124 | |
| 19 | 845 | H | 1 | exon | AAGTATGTGGAGCTTTACCTCGTGGCTGATTATTTAGAGGT | C>T | | N/A | 47811.36 AC008676 | 17324 | 725 |
| 20 | 845 | I | −1 | intron | TTAGAGGMGGCAATTCTACTCCGTGCATMTTAUGCATG | T>C | | N/A | 4781129 AC008676 | 2204 | |
| 21 | 845 | J | −1 | intron | CTTTTTAATCTCAAGCTCCACCAGAATGAAAGGGGGGGCT | C>A | | N/A | 47811.29 AC008676 | 6416 | |
| 22 | 845 | J | 1 | exon | CTACCCTCTGGTCCTTTCTCAGTTGGAGGCGCAAGCTGCTT | A>G | Ser>Gly | N/A | 4781129 AC008676 | 6601 | 927 |
| 23 | 845 | K | −1 | intron | AGAGGTGTGGTGAGCTGGAAGTTGTCCAGTTGGCCTGGTTA | G>T | | N/A | 47811.29 AC008676 | 8658 | |
| 24 | 845 | K | −2 | intron | GTATATTGTGGGAGATAAACGACCTTTCTCTCTCTCTTTGT | G>A | | N/A | 47811.29 AC008676 | 8578 | |
| 25 | 845 | K | 1 | exon | GCACCACCATCGGCCTGGCCCCCCTCATGGCCATGTGCTCTCT | C>T | Pro>Ser | N/A | 47811.29 AC008676 | 8855 | 1020 |
| 26 | 845 | P | +1 | intron | ATGAAATGAGGATGAACAAGCAGTTTCTGCTCTGTCCTCAC | C>T | | N/A | 47811.40 AC008676 | 9688 | |
| 27 | 845 | R | −1 | intron | ATATGTTCCAAGTGCAAAATCTTGCCTCCTACTCCCAACC | C>T | | N/A | 47811.40 AC008676 | 12353 | |
| 28 | 845 | R | 1 | exon | CTGTGGGAAGAAGTGCAATGGCCATGGGGTGCGTGCTGGGT | G>A | Gly>Asp | N/A | 47811.40 AC008676 | 12490 | 2056 |
| 29 | 847 | A | −1 | intron | GGCTGAGCGGCGGAGCCCCCCAAATGGCCTGGCCAGATGCG | C>T | | N/A | 13185AC011379 | 20517 | |
| 30 | 847 | A | 1 | exon | GCCGCCACTGGAGAAGGGTCGGTGCAGCAGCTACAGCGACA | G>A | Arg>Gln | N/A | 13185 A0011379 | 20585 | 278(v1-v6) |
| 31 | 847 | A | 2 | exon | GTACAGGGGCTGGTCCCAGCCGGCGGCTCCAGCTCCMCAG | C>T | | N/A | 13185 AC011379 | 20955 | 648(v1-v6) |
| 32 | 847 | C | +1 | intron | CAACAGCGGTAGGTGGGCCCAGACAGAGGGAAGGGTCCTAG | A>G | | N/A | 35F21 AC008667 | 13697 | |
| 33 | 847 | O | −1 | intron | ATGATTCCTGGGGCCTAGGGATAGTCTCAGTGCGTCACTGG | A>C | | N/A | 35F21 AC008667 | 22708 | |
| 34 | 847 | E | +1 | intron | CCTGCTCCT1AGAAAGCTTCTGGGTGCAGTCCCCCCAATGT | T>C | | N/A | 35F21 AC008667 | 29093 | |
| 35 | 847 | J | +1 | intron | CAGCCACAGGTAGGCACCACCAAGGCCCATGGTAACTTGTA | C>T | | N/A | 35F21 AC008667 | 42223 | |
| 36 | 847 | J | −1 | intron | GAAGGGGTGGGGGTTGATTTGCTGGAGCCATCGCTGCCCCA | G>T | | N/A | 35F21 AC008667 | 41929 | |
| 37 | 847 | K | −1 | intron | CGAGGTGGAAGAAAGAGCCAGGGAGGTCCATGGGACCACACC | G>A | | N/A | 35F21 AC008667 | 42735 | |
| 38 | 847 | K | 1 | exon | CTACAACCTGGAGGAGCGGCGCAGGGCCACCGCGCCACCCT | G>A | Arg>His | N/A | 35F21 AC008667 | 42974 | 1931(v1), 1913(v2), |
| | | | | | | | | | | | 1955(v3),1937(v4), |
| | | | | | | | | | | | N/A(v5),N/A(v6) |
| 39 | 874 | R | +1 | intron | GCTGGCCGTCCGGCGGCAGCTTGGGGAGTTCGGCACCGAGC | T>C | N/A | 82285 | RP11-163F8 | 82285 | N/A |
| 40 | 874 | R | 1 | exon | GCCCTTGACGTCAGAGTGTTTCTCCGCAGAGCCCGTGTCCTG | T>G | Phe>Leu | 81990 | RP11-163F8 | 81990 | 7 |
| 41 | 874 | R | 2 | exon | CAGAGGCGGCCAGGGGAGCGCGCCGCCCCGCTCGGCCOTCC | C>T | Arg>Cys | 82078 | RP11-163F8 | 82078 | 95 |
| 42 | 874 | S | +5 | intron | TTTTCATGTATGTTTTAAAACATAAAATGTAAAATATTCTG | C>G | N/A | 250203 | RP11-335L15 | 95682 | N/A |
| 43 | 874 | S | +4 | intron | TACTTTTCATGTATGTTTTAAAACATAAAATGTAAATATTA | A>G | N/A | 250200 | RP11-335L15 | 95679 | N/A |
| 44 | 874 | S | +3 | intron | TAAAACTACTTTTCATGTATGTTTTAAAACATAAATGTA | G>A | N/A | 250194 | RP11-335L15 | 95673 | N/A |
| 45 | 874 | S | 2 | intron | GGAGAGGGCAACTGTTTTCCACTGGTCTCTGAGAATACTAC | A>G | N/A | 250142 | RP11-335L15 | 95621 | N/A |
| 46 | 874 | S | 1 | intron | AGTGTTCCCTTGGACATAAACATGTCTACCATATTAGAGG | C>A | N/A | 250088 | RP11-335L15 | 95567 | N/A |
| 47 | 874 | S | −1 | intron | GCTGCTATAAAAATGAGACTCTCCACCTAAGTCAGGGAATG | C>G | N/A | 249852 | RP11-335L15 | 95331 | N/A |
| 48 | 874 | T | 1 | intron | TACTTTTAGTTTCTCTTTGATAGACATTTTAAGTTGGGTG | A>G | N/A | 264482 | RP11-335L15 | 109961 | N/A |
| 49 | 874 | T | −1 | intron | ATACAGACTCAACCAAAAACCGGTATTCTAAAGCTCATCAT | C>T | N/A | 264294 | RP11-335L15 | 109773 | N/A |
| 50 | 874 | U | −2 | intron | TCCTGCTTCATCCAGAACAGAATTGCTGTAATTCATTTTAA | A>T | N/A | 289067 | RP11-335L15 | 134546 | N/A |
| 51 | 874 | U | −1 | intron | CCTGCTTCATCCAGAACAGAATTGCTGTAATTCA1TFrAAG | A>G | N/A | 289068 | RP11-335L15 | 134547 | N/A |
| 52 | 874 | U | 1 | exon | ACCATGTCAAAAATCCGTGGCCAGGAGAAGGGGCCAGGCTA | C>T | None | 289343 | RP11-335L15 | 134822 | 409 |
| 53 | 874 | V | −3 | intron | TAAAGGAAAAAGTAACTGTTCCATTCTTGATGAGAGGTATT | C>G | N/A | 290091 | RP11-335L15 | 135570 | N/A |
| 54 | 874 | V | −2 | intron | GGTATTTACCCTCTTAGGGGGCATTGAGTCTGTTGCCTGGA | G>A | N/A | 290126 | RP11-335L15 | 135605 | N/A |
| 55 | 874 | V | −1 | intron | CCTCTTAGGGGGCATTGAGTCTGTTGCCTGGAGTGAACTGA | C>G | N/A | 290135 | RP11-335L15 | 135614 | N/A |
| 56 | 874 | X | −1 | intron | TATGTATGAAACAGTAGTGGCTGTTTAGGGATGGTAACGTG | C>A | N/A | 294088 | RP11-335L15 | 139567 | N/A |
| 57 | 874 | X | 1 | exon | TACCACAAGCAGGCAGTCCAGATCCTGCAGCAAGTCACGGT | G>A | None | 294212 | RP11-335L15 | 139691 | 865 |
| 58 | 874 | Y | 1 | intron | TGTCAATCATCAGCACACACGAACACATTTTGTTTTGACCC | G>A | N/A | 296674 | RP11-335L15 | 142153 | N/A |
| 59 | 874 | Y | 2 | intron | TTTTGACCCTCCTTTGTGGTCGTAAATCGCCTTTCCTTGTC | C>T | N/A | 296706 | RP11-335L15 | 142185 | N/A |
| 60 | 874 | Z | 1 | exon | ATCCTCTTAGCCTGGTGGGCGTGGCATGTGCTTTTTAAAAC | G>A | None | 298855 | RP11-335L15 | 144334 | 1430 |
| 61 | 962 | E | +2 | intron | CTCCGCTGCTCTCGCCTGGGTTFTGGAAAAGGGTTACCTGG | T>C | N/A | 7805 | CTC-500G13 | 7805 | N/A |
| | | | | | | | | | AC008544 | | |
| 62 | 962 | E | +1 | intron | TGCGATGGGCTGGTGAGTACGCACTTCTCTAGCTCCTTCT | G>C | N/A | 7764 | CTC-500G13 | 7764 | N/A |
| 63 | 962 | E | 2 | Exon | ACGAGCCCGCAGGGCCGCCCCGGTCCGGACCCCGAGCTTCC | C>T | Pro>Leu | 7493 | CTC-500G13 | 7493 | 272(v1-v2) |
| 64 | 962 | E | 3 | Exon | AACGAGGAGGAGCCTGGCAGTCACCTCTTCTACAATGTCAC | T>C | None | 7542 | CTC-500G13 | 7542 | 321(v1-v2) |
| 65 | 962 | G | +1 | Intron | CTGAGGGGGCAGGGTGGGGCGGGGAGGGTCAACCAGGGGCT | G>A | N/A | 143815 | CTC-500G13 | 143815 | N/A |
| 66 | 962 | G | −1 | Intron | TTTGCCCTGCCGCTGAAGACGGTGTCCTCTCCTGGCAGGGG | G>A | N/A | 143561 | CTC-500G13 | 143561 | N/A |
| 67 | 962 | G | 1 | Exon | GCCTCAGCCGCGCCCTGGGCGTCCTAGAGGAGCACGCCAAC | G>A | Val>Ile | 143623 | CTC-500G13 | 143623 | 733(v1-v2) |
| 68 | 962 | G | 2 | Exon | AGGGCACGCAGGCATGCTGCGGACGATGACTACAACATCGA | G>A | None | 143676 | CTC-500G13 | 143676 | 786(v1-v2) |
| 69 | 962 | G | 3 | Exon | CCTTGCAGGGGCCTCCCTGGACAGCCTGGACAGCCTCAGCC | A>G | Asp>Gly | 143591 | CTC-500G13 | 143591 | 701(v1-v2) |
| 70 | 962 | G | 4 | Exon | CAGCCTGGACAGCCTCAGCCGCGCCCTGGGCGTCCTAGAGG | G>A | Arg>His | 143612 | CTC-500G13 | 143612 | 722(v1-v2) |
| 71 | 962 | G | 5 | Exon | TGGGCGTCCTAGAGGAGCACGCCAACAGCTCGAGGCGGAGG | G>A | Ala>Thr | 143638 | CTC-500G13 | 143638 | 748(v1-v2) |
| 72 | 962 | G | 6 | Exon | CAGTTCCACGGGAAGGAGCACGTACAGAAGTACCTGCTGAC | C>T | None | 143748 | CTC-500G13 | 143748 | 858(v1-v2) |
| 73 | 962 | H | −1 | Intron | CCCATTGGCAGAGCCAGAGCCAGTCCTAGGGCCTGTGGTTC | C>T | N/A | 170091 | CTC-202F10 | 4024 | N/A |
| 74 | 962 | H | 1 | Exon | TCCTTGGGTGCCCACATCAACGTGGTCCTGGTGCGGATCAT | C>T | None | 170183 | CTC-202F10 | 4116 | 936(v1-v2) |
| 75 | 962 | H | +1 | Intron | AGGTTCCTATAAGAAACAAGATCCCTGCTCCCTTTCACCCC | A>G | N/A | 170372 | CTC-202F10 | 4305 | N/A |
| 76 | 962 | H | 2 | Intron | GGTTCCTATAAGAAACAAGATCCCTGCTCCCTTTCACCCCT | T>A | N/A | 170373 | CTC-202F10 | 4306 | N/A |
| 77 | 962 | I | −1 | Intron | CACTACAGCCTGCTCGGCCCCCCACTGGGCCACCAGGCGCC | C>T | N/A | 192358 | CTC-202F10 | 26291 | N/A |
| 78 | 962 | J | +1 | Intron | CGTGTAAGTGGCCTGGGGAAGGGTGGGGCACAGAGGGGCCA | G>A | N/A | 196498 | CTC-202F10 | 30431 | N/A |
| 79 | 962 | J | 1 | Intron | GCCTGGGAGTTAGGCCAGGCCTCACCTTCCCGGCCAGGCTA | C>T | N/A | 196318 | CTC-202F10 | 30251 | N/A |
| 80 | 962 | J | 1 | Exon | TGCACCCTGAACCATGAGGACGGCTGCTCCTCAGCGTTTGT | C>T | None | 196436 | CTC-202F10 | 30369 | 1194(v1-v2) |
| 81 | 962 | L | −2 | Intron | GCCGCGCTGAAGGCTGCTCGCGGCACCGTGTGTCCCCCACA | C>T | N/A | 197649 | CTC-202F10 | 31582 | N/A |
| 82 | 962 | L | −1 | Intron | CTGAAGGCTGCTCGCGGCACCGTGTGTCCCCCACAGCTCCT | C>T | N/A | 197655 | CTC-202F10 | 31588 | N/A |
| 83 | 962 | L | 1 | exon | TTCGCCCACGACTGGCCGGCGOTGCCCCAGCTCCCGGGACT | G>A | None | 197719 | CTC-202F10 | 31652 | 1431(v1-v2) |
| 84 | 962 | L | 2 | Exon | CAGCTCCCGGGACTGCACTACTCCATGAACGAGCAATGCCG | C>T | None | 197746 | CTC-202F10 | 31679 | 1458(v1-v2) |
| 85 | 962 | L | 3 | exon | GAGCAATGCCGCTTTGACTTCGGCCTGGGCTACATGATGTG | C>T | None | 197776 | CTC-202F10 A0010216 | 31709 | 1488(v1-v2) |
| 86 | 962 | M | −1 | Intron | CTTCACCACCCCAGAATCACAACACCCACCAGCCTCACGGG | A>G | N/A | 198901 | CTC-202F10 | 32834 | N/A |
| 87 | 962 | M | +1 | Intron | GCACCTGGCAAGGTGAGGCAGCATCAAGGGCTCTTGGAGGG | G>A | N/A | 199161 | CTC-202F10 | 33094 | N/A |
| 88 | 962 | M | +2 | Intron | AGGCAGCATCAAGGGCTCTTGGAGGGCAGCAGGGCAGAGGA | G>C | N/A | 199176 | CTC-202F10 | 33109 | N/A |
| 89 | 962 | M | +3 | Intron | TAATTACCOCTCACACGCTGTACGCCGGAGCTGCCTCCACC | T>C | N/A | 199313 | CTC-202F10 | 33246 | N/A |
| 90 | 962 | O | −2 | Intron | GAGCGCAGGACTGTCCCCACGGCCCGGTGTGAGGGTGAGTG | G>A | N/A | 211213 | CTC-202F10 | 45146 | N/A |
| 91 | 962 | O | −1 | Intron | GTGAGGGTGAGTGGAGGGACTGGCTTCCTGTCTTTCAGCAT | T>C | N/A | 211241 | CTC-202F10 | 45174 | N/A |
| 92 | 962 | O | +1 | Intron | GCAGCTGAGGGTCCAGGAGACCCTCTCCAGCCAGCCCTGTC | C>T | N/A | 211462 | CTC-202F10 | 45395 | N/A |
| 93 | 962 | P | −3 | Intron | GCTCAGCAGAGCTGCCCCCCGGACACCTGAGACTTAGGGAT | G>A | N/A | 213243 | CTC-202F10 | 47176 | N/A |
| 94 | 962 | P | −2 | Intron | AAGATCTCACAGGGCACCCGGGTGCTGCCTCTTTCCATG | G>A | N/A | 213294 | CTC-202F10 | 47227 | N/A |
| 95 | 962 | P | −1 | Intron | TCTTTCCAATGGCACGGAGCGGCAAGGCCTTTGCTTTCTCC | G>A | N/A | 213324 | CTC-202F10 | 47257 | N/A |
| 96 | 962 | P | +1 | Intron | TTCTGGGAGGCATCAGTGGGGGCTCAGCAGGCAGGCCCTAG | G>A | N/A | 213555 | CTC-202F10 | 47488 | N/A |
| 97 | 962 | Q | +1 | Intron | ATGAAGCGCATGGTGCATGACGGGACGCGCTGCTCCTACAA | C>T | N/A | 215329 | CTC-202F10 | 49262 | N/A |
| 98 | 962 | Q | +2 | Intron | GTACTGACCTCCCCCTTTTCGGGGTATTGGCAAGATGCATG | G>A | N/A | 215462 | CTC-202P10 | 49395 | N/A |
| 99 | 962 | Q | −1 | Intron | GTGGGGACCCTTGTGGAAATTTCTCCTGCTTGGTGCCTCCT | T>A | N/A | 215171 | CTC-202F10 | 49104 | N/A |
| 100 | 962 | Q | 1 | Exon | TACTGCGAGTCCAGGGAGACCGGGGAGGTGGTGTCCATGAA | C>T | None | 215293 | CTC-202F10 | 49226 | 1992(v1), N/A(v2) |
| 101 | 962 | Q | 2 | Exon | ACTGCGAGTCCAGGGAGACCGGGGAGGTGGTGTCCATGAAG | G>A | Gly>Arg | 215294 | CTC-202F10 | 49227 | 1993(v1), N/A(v2) |
| 102 | 962 | S | −1 | Intron | AGGGTCCTGGGAGAGCCTCCGGAGGAGCTGCCTTCAAGAGC | G>C | N/A | 218885 | CTC-202F10 | 52818 | N/A |
| 103 | 962 | T | −2 | Intron | CCAGTGGGCCTGGGTCCTGCTCTTGGGTGACCACAACGGGG | T>C | N/A | 221154 | CTC-202F10 | 55087 | N/A |
| 104 | 962 | T | −1 | Intron | ACGGGGGACTTGGTCGGCCATTCTCAGCCGTCAAGAACCT | A>G | N/A | 221189 | CTC-202F10 | 55122 | N/A |
| 105 | 962 | U | 1 | Exon | CATCCCGGTGGGAGACACCCGGGTCTCACTGACGTACAAAT | G>A | Arg>Gln | 223199 | CTC-202F10 | 57132 | 2480(v1), N/A(v2) |
| 106 | 962 | U | 2 | Exon | GAGGACTCACTGAATGTCGACGACACAACGTCCTGGAAGA | C>T | None | 223251 | CTC-202F10 | 57184 | 2532(v1), N/A(v2) |
| 107 | 962 | V | +1 | Intron | GCAGCCCACCCCTCCTTGCACCCTCGGGCAGGGCATGCTGC | C>T | N/A | 225111 | CTC-202F10 | 59044 | N/A |
| 108 | 962 | V | +1 | Intron | CCCACTAGAGGAGACAGGCCAGGGGCCACCAGGGGCTCCCG | A>G | N/A | 225340 | CTC-202F10 | 59273 | N/A |
| 109 | 962 | V | +2 | Intron | GCCTGGGCCTGGCATCATCCGAGGCATTTGACCAAGTCTCT | G>A | N/A | 225397 | CTC-202F10 | 59330 | N/A |
| 110 | 962 | Y | +1 | Intron | GATCTCGTCAAGTAACCGACCCGTTTATAACTCTGCCTCTG | C>T | N/A | 229644 | CTC-202F10 | 63577 | N/A |
| 111 | 962 | Y | +2 | intron | GTGACCGTTTTCTCCCGGGCCTCTGAGCTCGGCGTCCGCTC | C>G | N/A | 229782 | CTC-202F10 | 63715 | N/A |
| 112 | 962 | Z | 1 | Exon | TGGAAGATGAAGTCCAGCCACCCAACCTATCCCTCGACGA | C>T | Pro>Ser | 237321 | CTC-202F10 | 71254 | 3529(v1), N/A(v2) |
| 113 | 962 | Z | 2 | exon | CCACCGCCTGGGAAGCACAACGACAGGACGTGTTCATGCC | C>T | None | 237134 | CTC-202F10 | 71067 | 3342(v1), N/A(v2) |

### Example 6

[0337] Allele Specific Assay

[0338] Once variants were confirmed by sequencing, rapid allele specific assays were designed to type and diagnose more than 400 individuals (>200 cases and >200 controls) for use in the association studies. All coding SNPs (cSNPs) that resulted in an amino acid change were typed. Neutral polymorphisms were typed if: 1) the polymorphism was present in an exon lacking a cSNP; 2) the polymorphism was present in an exon containing a cSNP, but the two polymorphisms were observed to have different frequencies; or 3) the polymorphism was in an intronic region adjacent to an exon without a cSNP. If results from the association studies appeared positive, additional neutral polymorphisms were typed.

[0339] Three types of allele specific assays (ASAs) were used. If the SNP resulted in a mutation that created or abolished a restriction site, RFLPs were obtained from PCR products that spanned the variants, and were subsequently analyzed. If the polymorphism did not result in an RFLP, allele-specific oligonucleotide or exonuclease proofreading assays were used. For the allele-specific oligonucleotide assays, PCR products that spanned the polymorphism were electrophoresed on agarose gels and transferred to nylon membranes by Southern blotting. Oligomers 16-20 bp in length were designed such that the middle base was specific for each variant. The oligomers were labeled and successively hybridized to the membrane in order to determine genotypes.

[0340] Table 7, below, shows the information for the ASAs. The first column lists the SNP names. The second column lists the specific assays used (RFLP, ASO, an alternate method). The third column lists the enzymes used in the RFLP assay (described below). The fourth and fifth columns list the sequences of the oligos used in the ASO assay (described below). In addition, Table 7 contains the nucleic acid base change at the SNP location and if applicable, the corresponding amino acid change of the resulting protein.

TABLE 7
Allele Specific Assays

| SNP | ASA Type | RFLP Enzyme | ASO Oligo1 | ASO Oligo2 | Base change | A.A. change |
|---|---|---|---|---|---|---|
| 845_D_+1 | RFLP | Mspl | | | A>G | |
| 845_D_−1 | ASO | | GTGCCCGACCCAGGGA | GTGCCCGATCCAGGGAGC | C>T | |
| 845_D_1 | ASO | | AGCATCCACTCAAAGCTG | AGCATCCATTCAAAGCTGA | C>T | Leu>Phe |
| 845_F_+1 | RFLP | Bsp12861 | | | G>T | |
| 845_G_+1 | ASO | | GGGGACAGGCTTGTCC | CCTGGGGACAGTCTTGTCCCCT | G>T | |
| 845_H_+1 | RFLP | BsaJL | | | C>G | |
| 845_H_+2 | RFLP | Alwl | | | G>A | |
| 845_H_−1 | RFLP | Mscl | | | T>C | |
| 845_I_−1 | ASO | | GCAATTCTACTCCGTGCATAAT | CAATTCTACCCCGTGCATA | T>C | |
| 845_J_−1 | RFLP | Msll | | | C>A | |
| 845_J_1 | RFLP | Odel | | | A>G | Ser>Gly |
| 845_K_−1 | RFLP | Tsp5091 | | | G>T | |
| 845_K_−2 | ASO | | GAGATAAACAACCTTTCTCT | GAGATAAACGACCTTTCTCT | G>A | |
| 845_K_1 | RFLP | Sau961 | | | C>T | Pro>Ser |
| 845_P_+1 | RFLP | AlwNl | | | C>T | |
| 845_R_−1 | RFLP | Tsp5091 | | | C>T | |
| 845_R_1 | RFLP | Mscl | | | G>A | Gly>Asp |
| 847_A_1 | ASO | | GAAGGGTCGGTGCAGCA | GAAGGGTCAGTGCAGCAGC | G>A | Arg>Gln |
| 847_A_2 | RFLP | Pvull | | | C>T | |
| 847_C_+1 | RFLP | Ncil | | | A>G | |
| 847_D_−1 | ASO | | GGGCCTAGGGATAGTCTCAG | CCTAGGGCTAGTCTCAGT | A>C | |
| 847_E_+1 | RFLP | Ncil | | | T>C | |
| 847_J_+1 | ASO | | GCACCACCAAGGCCCAT | AGGCACCACTAAGGCCCAT | C>T | |
| 847_K_1 | ASO | | GAGCGGCGCAGGGCC | GGAGCGGCACAGGGCCA | G>A | Arg>His |
| 803_E_+2 | RFLP | Nlalll | | | A>G | |
| 803_H_+1 | ASO | | ACACCTCGCTGTGGGGT | GCACACCTCACTGTGGGG | G>A | |
| 803_H_−1 | ASO | | GTCCCCTCTCAGCCCCC | GTCCCCTCAGCCCCC | TC del | |
| 803_I_−1 | RFLP BslEl | | | G>C | | |
| 803_I_1 | ASO | | GTATAAGCCCAAGCCCC | GTATAAGCCGAAGCCCC | C>G | |
| 803_K_3 | RFLP | Hboll | | | G>A | Gly>Ser |
| 803_K_3 | Mboll | | | | C>T | |
| 962_E_+2 | ASO | | CGCCTGGGTTTTGGAAAAG | CGCCTGGGCTTTGGAAAA | T>C | |
| 962_E_2 | At Meth | | | C>T Pro>Leu | | |
| 962_E_3 | RFLP | Hphl | | | T>C | |
| 962_G_1 | RFLP | BsaHl | | | G>A | Val>Ile |
| 962_G_2 | RFLP | Pstl | | | G>A | |
| 962_G_4 | RFLP | BstUl | | | G>A | Arg>His |
| 962_G_5 | RFLP | Cac8l | | | G>A | Ala>Thr |
| 962_G_6 | RFLP | HpyCH4lV | | | C>T | |
| 962_H_+2 | RFLP | Dpnll | | | T>A | |
| 962_J_1 | Alt Meth | | | C>T | | |
| 962_L_2 | Alt Meth | | | C>T | | |
| 962_M_+2 | RFLP | Taq | | | G>C | |
| 962_P_−2 | RFLP | AlwNl | | | G>A | |
| 962_Q_−1 | RFLP | Asp5091 | | | T>A | G>C |
| 962_S_−2 | RFLP | Slyl | | | T>C | |
| 962_U_1 | RFLP | Aval | | | G>A | Arg>Gln |
| 962_U_2 | RFLP | Hincll | | | C>T | |
| 962_V_+2 | RFLP | Styl | | | G>A | |
| 962_V_−1 | ASO | | CCCGAGGGTGCAAGGA | GCCCGAGGATGCAAGGAG | C>T | |
| 962_Z_1 | Alt Meth | | | C>T | Pro>Ser | |
| 874_R_+1 | RFLP | BstNl | | | T>C | |
| 874_R_1 | Alt Meth | | | T>G | Phe>Leu | |
| 874_R_2 | ASO | | GGGAGCGCGCC | GCCGGGGAGCGTGCCGCCC | C>T | Arg>Cys |
| 874_S_+1 | RFLP | Nlalll | | | C>A | |
| 874_S_+3 | Alt Meth | | | G>A | | |
| 874_T_−1 | RFLP | Hpall | | | C>T | |
| 874_U_−2 | Alt Meth | | | A>T | | |
| 874_V_−1 | RFLP | Hinfl | | | C>G | |
| 874_X_1 | RFLP | Dpnll | | | G>A | |
| 874_Y_+2 | It Meth | | | C>T | | |
| 874_Z_1 | It Meth | | | G>A | | |

[0341] 1. RFLP Assay: The amplicon containing the polymorphism was PCR amplified using primers that generated fragments for sequencing (sequencing primers) or SSCP (SSCP primers). The appropriate population of individuals was PCR amplified in 96-well microtiter plates. Enzymes were purchased from NEB. The restriction cocktail containing the appropriate enzyme for the particular polymorphism was added to the PCR product. The reaction was incubated at the appropriate temperature according to the manufacturer's recommendations for 2-3 hr, followed by a 4° C. incubation. After digestion, the reactions were size fractionated using the appropriate agarose gel depending on the assay specifications (2.5%, 3%, or Metaphor, FMC Bioproducts). Gels were electrophoresed in 1× TBE buffer at 170 V for approximately 2 hr. The gel was illuminated using UV, and the image was saved as a Kodak 1D file. Using the Kodak 1D image analysis software, the images were scored and the data was exported to Microsoft® Excel (http://www.microsoft.com).

[0342] 2. ASO assay: The amplicon containing the polymorphism was PCR amplified using primers that generated fragments for sequencing (sequencing primers) or SSCP (SSCP primers). The appropriate population of individuals was PCR amplified in 96-well microtiter plates and re-arrayed into 384-well microtiter plates using a Tecan Genesis RSP200. The amplified products were loaded onto 2% agarose gels and size fractionated at 150V for 5 min. The DNA was transferred from the gel to Hybond N+ nylon membrane (Amersham-Pharmacia) using a Vacuum blotter (Bio-Rad). The filter containing the blotted PCR products was transferred to a dish containing 300 ml pre-hybridization solution (5×SSPE (pH 7.4), 2% SDS, 5× Denhardt's). The filter was incubated in pre-hybridization solution at 40° C. for over 1 hr. After pre-hybridization, 10 ml of the pre-hybridization solution and the filter were transferred to a washed glass bottle. The allele-specific oligonucleotides (ASO) were designed to contain the polymorphism in the middle of the nucleotide sequence. The size of the oligonucleotide was dependent upon the GC content of the sequence around the polymorphism. Those ASOs that had a G or C polymorphism were designed so that the Tₘ was between 54-56° C. Those ASOs that had an A or T polymorphism were designed so that the Tₘ was between 60-64° C. All oligonucleotides were phosphate-free at the 5′ ends and purchased from GibcoBRL. For each polymorphism, 2 ASOs were designed to yield one ASO for each strand.

[0343] The ASOs that represented each polymorphism were resuspended at a concentration of 1 μg/μl. Each ASO was end-labeled with γ-ATP³² (6000 Ci/mmol) (NEN) using T4 polynucleotide kinase according to manufacturer recommendations (NEB). The end-labeled products were removed from the unincorporated γ-ATP³² using a Sephadex G-25 column according to the manufacturer's instructions (Amersham-Pharmacia). The entire end-labeled product of one ASO was added to the bottle containing the appropriate filter and 10 ml hybridization solution. The hybridization reaction was placed in a rotisserie oven (Hybaid) and left at 40° C. for a minimum of 4 hr. The other ASO was stored at −20° C.

[0344] After the prerequisite hybridization time had elapsed, the filter was removed from the bottle and transferred to 1 L of wash solution (0.1×SSPE (pH 7.4) and 0.1% SDS) pre-warmed to 45° C. After 15 min, the filter was transferred to another liter of wash solution (0.1×SSPE (pH 7.4) and 0.1% SDS) pre-warmed to 50° C. After 15 min, the filter was wrapped in Saran Wrap®, placed in an autoradiograph cassette, and an X-ray film (Kodak) was placed on top of the filter. Typically, an image was visible within 1 hr. After an image was captured on film following the 50° C. wash, images were captured following wash steps at 55° C., 60° C. and 65° C. The best image was selected.

[0345] The ASO was removed from the filter by adding 1 L of boiling strip solution (0.1×SSPE (pH 7.4) and 0.1% SDS). This was repeated two more times. After removing the ASO, the filter was pre-hybridized in 300 ml pre-hybridization solution (5×SSPE (pH 7.4), 2% SDS, and 5× Denhardt's) at 40° C. for over 1 hr. The second end-labeled ASO corresponding to the other strand was removed from storage at −20° C. and thawed at RT. The filter was placed into a glass bottle along with 10 ml hybridization solution and the entire end-labeled product of the second ASO. The hybridization reaction was placed in a rotisserie oven (Hybaid, http://www.hybaid.co.uk) and left at 40° C. for a minimum of 4 hr. After the hybridization, the filter was washed at various temperatures and images captured on film as described above. The best image for each ASO was converted into a digital image by scanning the film into Adobe® Photoshop®. These images were overlaid using Graphic Converter, and the overlaid images were scored.

[0346] 3. Exonuclease Proofreading Assay: Exonuclease Proofreading Assays (EPAs) were also employed (see U.S. Pat. No. 5,391,480). Briefly, primers corresponding to the polymorphisms of interest were designed to contain fluorescent tags at the 3′ ends. The primers were designed such that the 3′ ends contained the variant or consensus nucleotides. Mismatched bases at the 3′ ends were removed by an exonuclease proof-reading enzyme (Pwo DNA polymerase; Roche, Germany; Cat. No. 1-644-855) in the PCR reaction. Where bases were matched, the resulting PCR products contained the tagged bases. The tagged bases were detected by gel electrophoresis or florescent polarization

### Example 7

[0347] Association Study Analysis

[0348] 1. Case-Control Study All the genes listed in Tables 1 and 2 are involved in asthma and related disorders however, in order to determine which polymorphisms in candidate genes are strongly associated with the asthma phenotype, association studies were performed using a case-control design. In a well-matched design, the case-control approach is more powerful than the family based transmission disequilibrium test (TDT) (N. E. Morton and A. Collins, 1998, Proc. Natl. Acad. Sci. USA 95:11389-93). Case-control studies are, however, sensitive to population admixture.

[0349] To avoid issues of population admixture, which can bias case-control studies, unaffected controls were collected in both the US and the UK. A total of three hundred controls were collected, 200 in the UK and 100 in the US. Inclusion into the study required that the control individual was 1) negative for asthma (as determined by self-report of never having asthma); 2) had no first-degree relatives with asthma; and 3) was negative for eczema and symptoms indicative of atopy for the past 12 months. Data from an abbreviated questionnaire similar to that administered to the affected sib pair families were collected. Results from skin prick tests to 4 common allergens were also collected. The results of the skin prick tests were used to select a subset of controls that were most likely to be asthma and atopy negative.

[0350] A subset of unrelated cases was selected from the affected sib pair families based on the evidence for linkage at the chromosomal location near a given gene. One affected sib demonstrating identity-by-descent (IBD) at the appropriate marker loci was selected from each family. As the appropriate cases may vary for each gene in the region, a larger collection of individuals who were IBD across a larger interval was genotyped. A subset of this collection was used in the analyses. Over 100 IBD affected individuals and 200 controls were compared for allele and genotype frequencies.

[0351] For each polymorphism, the frequency of the alleles in the control and case populations was compared using a Fisher's exact test. A mutation that increased susceptibility to the disease was expected to be more prevalent in the cases than in the controls, while a protective mutation was expected to be more prevalent in the control group. Similarly, the genotype frequencies of the SNPs were compared between cases and controls. P-values for the allele and genotype tests are tabulated. A small p-value was deemed indicative of an association between the SNPs and the disease phenotype. The analysis was repeated for the US and UK populations, separately, to correct for genetic heterogeneity. The association tables under this section show the least frequent base or allele in the control population. Table 5 above shows all base changes for the particular SNP location. Therefore, a particular allele or base may be discussed as significant in the text under this section but the particular base is not reported in the tables below. Thus, the base at the particular location can be identified using Table 5.

[0352] 2. Association test with individual SNPs: Fourteen SNPs in Gene 845, seven SNPs in Gene 847, four SNPs in Gene 874, six SNPs in Gene 803 and 16 SNPs in Gene 962 were typed. Four separate phenotypes were used in these analyses: asthma, bronchial hyper-responsiveness, total IgE, and specific IgE.

[0353] a. Asthma Phenotype: Frequencies and p-values for all typed SNPs are shown in Tables 9, 10, and 11 for the combined population and for the UK and US populations, separately. Column 1 lists the SNP names, which were derived from the gene numbers and closest exons. Column 2 lists the allele name. Columns 3 and 4 list the control (“CNTL”) allele frequencies and sample sizes (“N”), respectively. Columns 5 and 6 list the affected individuals (“CASE”) allele frequencies and sample sizes (“N”), respectively. Columns 7 and 8 list the p-values for the comparison between the case and control allele and genotype frequencies, respectively. A single SNP in Gene 845 reached statistical significance in the US population alone for the allele test: SNP P+1. For this SNP, 17.4% of the cases were carriers of the T allele, whereas the T allele was observed in only 6.5% of the controls (allele test p=0.0366). A single SNP in Gene 803 reached statistical significance in the combined and the US population alone for both the allele and the genotype tests: SNP K 2. For this SNP, 2.1% of the cases in the combined population were carriers of the A allele, whereas the A allele was observed in only 0.2% of the controls (combined: allele test p=0.0242, genotype test p=0.0237; US: allele test p=0.0475, genotype test p=0.0467). Five SNPs in Gene 962 reached statistical significance in the combined and the US population alone for both the allele and the genotype tests: 15.2% of the cases were carriers of the C allele in SNP M+2, whereas the C allele was observed in only 13.2% of the controls (US: genotype test p=0.0336), 40.5% of the cases were carriers of the A allele in SNP P−2, whereas the A allele was observed in only 22.4% of the controls (US: allele test p=0.0286, genotype test p=0.0227), 39.1% of the cases were carriers of the A allele in SNP Q−1, whereas the A allele was observed in only 21.7% of the controls (US: allele test p=0.0218, genotype test p=0.0375), 39.6% of the cases were carriers of the T allele in SNP U 2, whereas the T allele was observed in only 21.7% of the controls (US: allele test p=0.0225, genotype test p=0.0284) and 73.5% of the cases were carriers of the C allele in SNP V−1, whereas the C allele was observed in only 65.2% of the controls SNP V−1 (combined: allele test p=0.0383).

TABLE 9
ASSOCIATION ANALYSIS OF ASTHMA PHENOTYPE
COMBINED US/UK POPULATION
Combined US & UK

| | | | FREQUENCIES | | | ALLELE | GENOTYPE |
|---|---|---|---|---|---|---|---|
| GENE_EXON | ALLELE | CNTL | N | CASE | N | P-VALUE | P-VALUE |
| 845_R_1 | A | 14.8% | 216 | 12.5% | 100 | 0.4634 | 0.7361 |
| 845_R_−1 | T | 28.7% | 214 | 26.0% | 102 | 0.5070 | 0.7697 |
| 845_P_+1 | T | 6.5% | 217 | 9.5% | 105 | 0.1998 | 0.3027 |
| 845_K_1 | T | 0.2% | 210 | 0.0% | 96 | 1.0000 | 1.0000 |
| 845_K_−2 | A | 28.9% | 216 | 24.0% | 98 | 0.2103 | 0.4160 |
| 845_J_1 | G | 34.5% | 210 | 38.8% | 103 | 0.3296 | 0.5664 |
| 845_J_−1 | C | 37.1% | 217 | 38.5% | 104 | 0.7940 | 0.4453 |
| 845_I_−1 | C | 12.8% | 191 | 11.5% | 104 | 0.6962 | 0.6932 |
| 845_H_+1 | G | 19.6% | 217 | 14.9% | 104 | 0.1559 | 0.3133 |
| 845_H_−1 | T | 45.2% | 217 | 44.2% | 103 | 0.8650 | 0.7396 |
| 845_G_+1 | T | 13.2% | 216 | 13.9% | 104 | 0.8053 | 0.5846 |
| 845_F_+1 | T | 18.4% | 215 | 17.6% | 105 | 0.9130 | 0.5565 |
| 845_D_1 | T | 0.2% | 216 | 1.0% | 99 | 0.2339 | 0.2335 |
| 845_D_−1 | T | 9.9% | 217 | 11.1% | 99 | 0.6727 | 0.4308 |
| 847_K_1 | A | 4.9% | 214 | 5.7% | 97 | 0.6976 | 0.6900 |
| 847_J_+1 | T | 4.9% | 216 | 2.3% | 109 | 0.1394 | 0.1312 |
| 847_E_+1 | C | 12.6% | 210 | 13.1% | 107 | 0.9001 | 0.4982 |
| 847_D_−1 | C | 16.9% | 210 | 18.3% | 93 | 0.7272 | 0.8153 |
| 847_C_+1 | G | 17.9% | 209 | 20.8% | 108 | 0.3932 | 0.1700 |
| 847_A_2 | T | 6.7% | 217 | 7.3% | 109 | 0.7457 | 0.7365 |
| 847_A_1 | A | 1.0% | 192 | 0.5% | 103 | 0.6625 | 0.6610 |
| 874_R_+1 | T | 39.9% | 202 | 35.6% | 94 | 0.3645 | 0.2706 |
| 874_S_+1 | A | 39.5% | 214 | 41.9% | 99 | 0.5993 | 0.8366 |
| 874_T_−1 | T | 48.6% | 213 | 50.0% | 100 | 0.7971 | 0.8135 |
| 874_V_−1 | G | 17.6% | 216 | 19.5% | 100 | 0.5803 | 0.3894 |
| 803_K_3 | T | 0.9% | 218 | 1.2% | 121 | 0.7046 | 0.7035 |
| 803_K_2 | A | 0.2% | 217 | 2.1% | 121 | 0.0242 | 0.0237 |
| 803_I_1 | G | 28.2% | 195 | 26.9% | 119 | 0.7829 | 0.4504 |
| 803_I_−1 | C | 0.2% | 217 | 0.0% | 118 | 1.0000 | 1.0000 |
| 803_H_+1 | A | 25.2% | 218 | 24.4% | 119 | 0.8524 | 0.9029 |
| 803_E_+2 | A | 44.2% | 208 | 45.3% | 118 | 0.8060 | 0.8313 |
| 962_E_3 | C | 35.6% | 212 | 38.7% | 115 | 0.4455 | 0.4859 |
| 962_E_+2 | C | 12.7% | 217 | 10.4% | 120 | 0.4558 | 0.3772 |
| 962_G_4 | A | 13.6% | 202 | 9.6% | 114 | 0.1641 | 0.2877 |
| 962_G_1 | A | 27.2% | 217 | 34.3% | 121 | 0.0541 | 0.0932 |
| 962_G_2 | A | 7.6% | 217 | 7.6% | 118 | 1.0000 | 0.4312 |
| 962_G_6 | T | 20.4% | 194 | 17.8% | 115 | 0.4632 | 0.7068 |
| 962_H_+2 | A | 41.5% | 217 | 39.5% | 119 | 0.6236 | 0.6019 |
| 962_M_+2 | C | 12.7% | 213 | 9.3% | 113 | 0.2455 | 0.1865 |
| 962_P_−2 | A | 23.8% | 214 | 25.4% | 114 | 0.7026 | 0.4231 |
| 962_Q_−1 | A | 23.7% | 215 | 25.7% | 115 | 0.6345 | 0.7013 |
| 962_S_−1 | C | 11.4% | 215 | 7.6% | 119 | 0.1388 | 0.3757 |
| 962_U_1 | A | 3.0% | 214 | 3.5% | 115 | 0.8173 | 0.8144 |
| 962_U_2 | T | 23.8% | 212 | 25.0% | 118 | 0.7763 | 0.8883 |
| 962_V_−1 | T | 34.8% | 187 | 26.5% | 115 | 0.0383 | 0.0954 |
| 962_V_+2 | A | 4.5% | 209 | 2.5% | 119 | 0.2117 | 0.5991 |
| 962_Z_1 | T | 31.9% | 216 | 33.1% | 121 | 0.7970 | 0.1515 |

[0354] TABLE 10
ASSOCIATION ANALYSIS OF ASTHMA
PHENOTYPE UK POPULATION
UK population

| | | | FREQUENCIES | | | ALLELE | GENOTYPE |
|---|---|---|---|---|---|---|---|
| GENE_EXON | ALLELE | CNTL | N | CASE | N | P-VALUE | P-VALUE |
| 845_R_1 | A | 13.6% | 140 | 13.9% | 79 | 1.0000 | 0.9021 |
| 845_R_−1 | T | 26.6% | 137 | 25.3% | 79 | 0.8205 | 0.9047 |
| 845_P_+1 | T | 6.4% | 140 | 7.3% | 82 | 0.7005 | 0.6394 |
| 845_K_I | T | 0.4% | 135 | 0.0% | 73 | 1.0000 | 1.0000 |
| 845_K_−2 | A | 27.0% | 139 | 24.0% | 77 | 0.5669 | 0.8306 |
| 845_J_1 | G | 36.6% | 134 | 37.5% | 80 | 0.9176 | 0.9804 |
| 845_J_−1 | C | 37.5% | 140 | 40.1% | 81 | 0.6126 | 0.5300 |
| 845_I_−1 | C | 12.6% | 127 | 11.1% | 81 | 0.7575 | 0.9186 |
| 845_H_+1 | G | 19.3% | 140 | 16.0% | 81 | 0.4428 | 0.5503 |
| 845_H_−1 | T | 43.6% | 140 | 42.6% | 81 | 0.9207 | 0.9647 |
| 845_G_+1 | T | 3.2% | 140 | 14.8% | 81 | 0.6688 | 0.6235 |
| 845_F_+1 | T | 8.8% | 138 | 18.3% | 82 | 1.0000 | 0.9315 |
| 845_D_1 | T | 0.0% | 140 | 1.3% | 78 | 0.1275 | 0.1270 |
| 845_D−—1 | T | 9.3% | 140 | 10.3% | 78 | 0.7377 | 0.7237 |
| 847_K_1 | A | 3.6% | 139 | 4.8% | 73 | 0.6053 | 0.5980 |
| 847_J_+1 | T | 2.9% | 139 | 2.4% | 85 | 1.0000 | 1.0000 |
| 847_E_+1 | C | 12.8% | 133 | 14.1% | 85 | 0.7727 | 0.2313 |
| 847_D_−1 | C | 16.5% | 136 | 21.2% | 73 | 0.2351 | 0.2901 |
| 847_C_+1 | G | 17.8% | 132 | 22.9% | 85 | 0.2175 | 0.0894 |
| 847_A_2 | T | 5.4% | 140 | 7.1% | 85 | 0.5400 | 0.5266 |
| 847_A_1 | A | 1.3% | 120 | 0.6% | 83 | 0.6479 | 0.6462 |
| 874_R_+1 | T | 41.5% | 129 | 35.8% | 74 | 0.2918 | 0.4463 |
| 874_S_+1 | A | 38.0% | 137 | 42.3% | 78 | 0.4122 | 0.5428 |
| 874_T_−1 | T | 48.9% | 136 | 50.6% | 79 | 0.7645 | 0.9496 |
| 874_V_−1 | G | 16.9% | 139 | 19.6% | 79 | 0.5164 | 0.5248 |
| 803_K_3 | T | 1.1% | 140 | 1.5% | 99 | 0.6955 | 0.6940 |
| 803_K_2 | A | 0.4% | 139 | 1.5% | 99 | 0.3124 | 0.3104 |
| 803_I_1 | G | 28.6% | 117 | 24.7% | 97 | 0.3827 | 0.2487 |
| 803_I_−1 | C | 0.4% | 139 | 0.0% | 96 | 1.0000 | 1.0000 |
| 803_H_+1 | A | 25.7% | 140 | 25.3% | 97 | 1.0000 | 0.8747 |
| 803_E_+2 | A | 42.4% | 132 | 46.9% | 96 | 0.3903 | 0.5906 |
| 962_E_3 | C | 36.8% | 136 | 36.4% | 92 | 1.0000 | 0.9824 |
| 962_E_+2 | C | 12.5% | 140 | 9.9% | 96 | 0.4621 | 0.7476 |
| 962_G_4 | A | 14.0% | 132 | 10.6% | 90 | 0.3105 | 0.4407 |
| 962_G_1 | A | 25.2% | 139 | 33.5% | 97 | 0.0502 | 0.1164 |
| 962_G_2 | A | 6.4% | 140 | 7.4% | 94 | 0.7106 | 0.5925 |
| 962_G_6 | T | 21.7% | 129 | 16.8% | 92 | 0.2261 | 0.3013 |
| 962_H_+2 | A | 43.6% | 140 | 39.5% | 95 | 0.3926 | 0.5214 |
| 962_M_+2 | C | 12.4% | 137 | 7.8% | 90 | 0.1221 | 0.3225 |
| 962_P_−2 | A | 24.6% | 136 | 22.0% | 93 | 0.5757 | 0.7940 |
| 962_Q_−1 | A | 24.8% | 139 | 22.3% | 92 | 0.5776 | 0.8022 |
| 962_S_−1 | C | 10.9% | 137 | 6.3% | 95 | 0.1006 | 0.2430 |
| 962_U_1 | A | 3.7% | 136 | 3.7% | 94 | 1.0000 | 1.0000 |
| 962_U_2 | T | 25.0% | 136 | 21.3% | 94 | 0.3727 | 0.7464 |
| 962_V_−1 | T | 34.4% | 122 | 27.2% | 92 | 0.1154 | 0.0909 |
| 962_V_+2 | A | 4.5% | 134 | 2.6% | 95 | 0.4526 | 0.7627 |
| 962_Z_1 | T | 30.0% | 140 | 35.1% | 97 | 0.2713 | 0.0735 |

[0355] TABLE 11
ASSOCIATION ANALYSIS OF ASTHMA
PHENOTYPE US POPULATION
US population

| | | | FREQUENCIES | | | ALLELE | GENOTYPE |
|---|---|---|---|---|---|---|---|
| GENE_EXON | ALLELE | CNTL | N | CASE | N | P-VALUE | P-VALUE |
| 845_R_1 | A | 17.1% | 76 | 7.1% | 21 | 0.1433 | 0.3391 |
| 845_R_−1 | T | 32.5% | 77 | 28.3% | 23 | 0.7180 | 0.5080 |
| 845_P_+1 | T | 6.5% | 77 | 17.4% | 23 | 0.0366 | 0.1001 |
| 845_K_1 | T | 0.0% | 75 | 0.0% | 23 | 1.0000 | 1.0000 |
| 845_K_−2 | A | 32.5% | 77 | 23.8% | 21 | 0.3465 | 0.5335 |
| 845_J_1 | G | 30.9% | 76 | 43.5% | 23 | 0.1542 | 0.2183 |
| 845_J_−1 | C | 36.4% | 77 | 32.6% | 23 | 0.7267 | 0.8775 |
| 845_I_−1 | C | 13.3% | 64 | 13.0% | 23 | 1.0000 | 0.8761 |
| 845_H_+1 | G | 20.1% | 77 | 10.9% | 23 | 0.1915 | 0.3921 |
| 845_H_−1 | T | 48.1% | 77 | 50.0% | 22 | 0.8652 | 0.3922 |
| 845_G_+1 | T | 13.2% | 76 | 10.9% | 23 | 0.8037 | 1.0000 |
| 845_F_+1 | T | 17.5% | 77 | 15.2% | 23 | 0.8253 | 0.6755 |
| 845_D_1 | T | 0.7% | 76 | 0.0% | 21 | 1.0000 | 1.0000 |
| 845_D_−1 | T | 11.0% | 77 | 14.3% | 21 | 0.5906 | 0.2681 |
| 847_K_1 | A | 7.3% | 75 | 8.3% | 24 | 0.7617 | 0.7545 |
| 847_J_+1 | T | 8.4% | 77 | 2.1% | 24 | 0.1949 | 0.1777 |
| 847_E_+1 | C | 12.3% | 77 | 9.1% | 22 | 0.7899 | 0.7751 |
| 847_D_−1 | C | 17.6% | 74 | 7.5% | 20 | 0.1431 | 0.3321 |
| 847_C_+1 | G | 18.2% | 77 | 13.0% | 23 | 0.5067 | 0.9089 |
| 847_A_2 | T | 9.1% | 77 | 8.3% | 24 | 1.0000 | 1.0000 |
| 847_A_1 | A | 0.7% | 72 | 0.0% | 20 | 1.0000 | 1.0000 |
| 874_R_+1 | T | 37.0% | 73 | 35.0% | 20 | 0.8552 | 0.4180 |
| 874_S_+1 | A | 42.2% | 77 | 40.5% | 21 | 0.8620 | 0.7119 |
| 874_T_−1 | T | 48.1% | 77 | 47.6% | 21 | 1.0000 | 0.8466 |
| 874_V_−1 | G | 18.8% | 77 | 19.1% | 21 | 1.0000 | 0.7254 |
| 803_K_3 | T | 0.6% | 78 | 0.0% | 22 | 1.0000 | 1.0000 |
| 803_K_2 | A | 0.0% | 78 | 4.6% | 22 | 0.0475 | 0.0467 |
| 803_I_1 | G | 27.6% | 78 | 36.4% | 22 | 0.2666 | 0.4829 |
| 803_I_−1 | C | 0.0% | 78 | 0.0% | 22 | 1.0000 | 1.0000 |
| 803_H_+1 | A | 24.4% | 78 | 20.5% | 22 | 0.6895 | 0.9220 |
| 803_E_+2 | A | 47.4% | 76 | 38.6% | 22 | 0.3902 | 0.6005 |
| 962_E_3 | C | 33.6% | 76 | 47.8% | 23 | 0.0842 | 0.0784 |
| 962_E_+2 | C | 13.0% | 77 | 12.5% | 24 | 1.0000 | 0.2140 |
| 962_G_4 | A | 12.9% | 70 | 6.3% | 24 | 0.2910 | 0.5390 |
| 962_G_1 | A | 30.8% | 78 | 37.5% | 24 | 0.3839 | 0.5552 |
| 962_G_2 | A | 9.7% | 77 | 8.3% | 24 | 1.0000 | 1.0000 |
| 962_G_6 | T | 17.7% | 65 | 21.7% | 23 | 0.5195 | 0.7849 |
| 962_H_+2 | A | 37.7% | 77 | 39.6% | 24 | 0.8654 | 1.0000 |
| 962_M_+2 | C | 13.2% | 76 | 15.2% | 23 | 0.8065 | 0.0336 |
| 962_P_−2 | A | 22.4% | 78 | 40.5% | 21 | 0.0286 | 0.0227 |
| 962_Q_−1 | A | 21.7% | 76 | 39.1% | 23 | 0.0218 | 0.0375 |
| 962_S_−1 | C | 12.2% | 78 | 12.5% | 24 | 1.0000 | 0.8999 |
| 962_U_1 | A | 1.9% | 78 | 2.4% | 21 | 1.0000 | 1.0000 |
| 962_U_2 | T | 21.7% | 76 | 39.6% | 24 | 0.0225 | 0.0284 |
| 962_V_−1 | T | 35.4% | 65 | 23.9% | 23 | 0.1995 | 0.1120 |
| 962_V_+2 | A | 4.7% | 75 | 2.1% | 24 | 0.6823 | 0.6754 |
| 962_Z_1 | T | 35.5% | 76 | 25.0% | 24 | 0.2185 | 0.2520 |

[0356] b. Bronchial Hyper-responsiveness: The analyses were repeated using asthmatic children with borderline to severe BHR (PC₂₀≦16 mg/ml) or PC₂₀(16), as described in the Linkage Analysis section. (Example 3). First, sibling pairs were identified where both sibs were affected and satisfied this new criterion. Of these pairs, one sib was included in the case/control analyses if they showed evidence of linkage at the gene of interest. This phenotype was more restrictive than the Asthma yes/no criteria; hence the number of cases included in the analyses was reduced by approximately 57%. Where the PC₂₀(16) subgroup represented a more genetically homogeneous sample, one could expect an increase in the effect size compared to the one observed in the original set of cases. However, the reduction in sample size could result in estimates that were less accurate. This, in turn, could obscure a trend in allele frequencies in the control group, the original set of cases, and the PC₂₀(16) subgroup. In addition, the reduction in sample size could induce a reduction in power (and increase in p-values) in spite of the larger effect size.

[0357] The significance levels (p-values) for allele and genotype association of all typed SNPs to the BHR phenotype are shown in Tables 12, 13, and 14 for the combined population and for the UK and US populations separately. Allele frequencies are also included in the tables.

TABLE 12
ASSOCIATION ANALYSIS OF BHR
PHENOTYPE COMBINED US/UK POPULATION
Combined US & UK

| | | | FREQUENCIES | | | ALLELE | GENOTYPE |
|---|---|---|---|---|---|---|---|
| GENE_EXON | ALLELE | CNTL | N | CASE | N | P-VALUE | P-VALUE |
| 845_R_1 | A | 14.8% | 216 | 8.3% | 42 | 0.1227 | 0.3809 |
| 845_R_−1 | T | 28.7% | 214 | 23.8% | 42 | 0.4252 | 0.5421 |
| 845_P_+1 | T | 6.5% | 217 | 12.5% | 44 | 0.0715 | 0.0821 |
| 845_K_1 | T | 0.2% | 210 | 0.0% | 42 | 1.0000 | 1.0000 |
| 845_K_−2 | A | 28.9% | 216 | 20.9% | 43 | 0.1469 | 0.3532 |
| 845_J_1 | G | 34.5% | 210 | 50.0% | 43 | 0.0098 | 0.0151 |
| 845_J_−1 | C | 37.1% | 217 | 31.8% | 44 | 0.3952 | 0.5677 |
| 845_I_−1 | C | 12.8% | 191 | 12.5% | 44 | 1.0000 | 0.9160 |
| 845_H_+1 | G | 19.6% | 217 | 12.5% | 44 | 0.1325 | 0.2182 |
| 845_H_−1 | T | 45.2% | 217 | 37.5% | 44 | 0.1969 | 0.1876 |
| 845_G_+1 | T | 13.2% | 216 | 14.8% | 44 | 0.7318 | 0.4613 |
| 845_F_+1 | T | 18.4% | 215 | 18.2% | 44 | 1.0000 | 0.3208 |
| 845_D_1 | T | 0.2% | 216 | 1.2% | 42 | 0.2993 | 0.2996 |
| 845_D_−1 | T | 9.9% | 217 | 20.2% | 42 | 0.0139 | 0.0083 |
| 847_K_1 | A | 4.9% | 214 | 3.6% | 42 | 0.7810 | 0.7754 |
| 847_J_+1 | T | 4.9% | 216 | 1.1% | 47 | 0.1502 | 0.1413 |
| 847_E_+1 | C | 12.6% | 210 | 12.0% | 46 | 1.0000 | 0.9162 |
| 847_D_−1 | C | 16.9% | 210 | 15.1% | 43 | 0.7526 | 0.7296 |
| 847_C_+1 | G | 17.9% | 209 | 17.7% | 48 | 1.0000 | 1.0000 |
| 847_A_2 | T | 6.7% | 217 | 4.2% | 48 | 0.4852 | 0.4699 |
| 847_A_1 | A | 1.0% | 192 | 1.0% | 48 | 1.0000 | 1.0000 |
| 874_R_+1 | T | 39.9% | 202 | 29.3% | 46 | 0.0738 | 0.1586 |
| 874_S_+1 | A | 39.5% | 214 | 42.6% | 47 | 0.6422 | 0.8454 |
| 874_T_−1 | T | 48.6% | 213 | 46.9% | 48 | 0.8214 | 0.4498 |
| 874_V_−1 | G | 17.6% | 216 | 18.8% | 48 | 0.7695 | 0.6737 |
| 803_K_3 | T | 0.9% | 218 | 2.6% | 58 | 0.1647 | 0.1635 |
| 803_K_2 | A | 0.2% | 217 | 0.9% | 58 | 0.3776 | 0.3779 |
| 803_I_1 | G | 28.2% | 195 | 28.5% | 58 | 1.0000 | 1.0000 |
| 803_I_−1 | C | 0.2% | 217 | 0.0% | 56 | 1.0000 | 1.0000 |
| 803_H_+1 | A | 25.2% | 218 | 21.9% | 57 | 0.5414 | 0.6420 |
| 803_E_+2 | A | 44.2% | 208 | 46.5% | 57 | 0.6722 | 0.8478 |
| 962_E_3 | C | 35.6% | 212 | 34.7% | 49 | 0.9071 | 0.9013 |
| 962_E_+2 | C | 12.7% | 217 | 8.7% | 52 | 0.3128 | 0.5841 |
| 962_G_4 | A | 13.6% | 202 | 8.3% | 48 | 0.1756 | 0.2010 |
| 962_G_1 | A | 27.2% | 217 | 29.8% | 52 | 0.6260 | 0.5278 |
| 962_G_2 | A | 7.6% | 217 | 8.8% | 51 | 0.6830 | 0.6707 |
| 962_G_6 | T | 20.4% | 194 | 15.3% | 49 | 0.3165 | 0.4404 |
| 962_H_+2 | A | 41.5% | 217 | 35.3% | 51 | 0.2641 | 0.2847 |
| 962_M_+2 | C | 12.7% | 213 | 8.2% | 49 | 0.2968 | 0.2530 |
| 962_P_−2 | A | 23.8% | 214 | 21.4% | 49 | 0.6921 | 0.4539 |
| 962_Q_−1 | A | 23.7% | 215 | 21.9% | 48 | 0.7901 | 0.6686 |
| 962_S_−1 | C | 11.4% | 215 | 7.8% | 51 | 0.3741 | 0.4768 |
| 962_U_1 | A | 3.0% | 214 | 4.9% | 51 | 0.3617 | 0.3548 |
| 962_U_2 | T | 23.8% | 212 | 20.0% | 50 | 0.5095 | 0.7424 |
| 962_V_−1 | T | 34.8% | 187 | 26.5% | 49 | 0.1476 | 0.2075 |
| 962_V_+2 | A | 4.5% | 209 | 2.0% | 51 | 0.3973 | 0.5039 |
| 962_Z_1 | T | 31.9% | 216 | 37.5% | 52 | 0.2968 | 0.2436 |

[0358] TABLE 13
ASSOCIATION ANALYSIS OF BHR
PHENOTYPE UK POPULATION
UK population

| | | | FREQUENCIES | | | ALLELE | GENOTYPE |
|---|---|---|---|---|---|---|---|
| GENE_EXON | ALLELE | CNTL | N | CASE | N | P-VALUE | P-VALUE |
| 845_R_1 | A | 13.6% | 140 | 9.7% | 36 | 0.4358 | 0.9112 |
| 845_R_−1 | T | 26.6% | 137 | 21.4% | 35 | 0.4437 | 0.3471 |
| 845_P_+1 | T | 6.4% | 140 | 10.8% | 37 | 0.2120 | 0.2939 |
| 845_K_1 | T | 0.4% | 135 | 0.0% | 35 | 1.0000 | 1.0000 |
| 845_K_−2 | A | 27.0% | 139 | 18.1% | 36 | 0.1299 | 0.3673 |
| 845_J_1 | G | 36.6% | 134 | 51.4% | 36 | 0.0296 | 0.0475 |
| 845_J_−1 | C | 37.5% | 140 | 33.8% | 37 | 0.5899 | 0.8093 |
| 845_I_−1 | C | 12.6% | 127 | 12.2% | 37 | 1.0000 | 1.0000 |
| 845_H_+1 | G | 19.3% | 140 | 14.9% | 37 | 0.4994 | 0.7871 |
| 845_H_−1 | T | 43.6% | 140 | 33.8% | 37 | 0.1454 | 0.1454 |
| 845_G_+1 | T | 13.2% | 140 | 14.9% | 37 | 0.7047 | 0.5094 |
| 845_F_+1 | T | 18.8% | 138 | 18.9% | 37 | 1.0000 | 0.5839 |
| 845_D_1 | T | 0.0% | 140 | 1.4% | 36 | 0.2045 | 0.2045 |
| 845_D_−1 | T | 9.3% | 140 | 20.8% | 36 | 0.0120 | 0.0069 |
| 847_K_1 | A | 3.6% | 139 | 4.4% | 34 | 0.7250 | 0.7214 |
| 847_J_+1 | T | 2.9% | 139 | 1.3% | 39 | 0.6900 | 0.6859 |
| 847_E_+1 | C | 12.8% | 133 | 14.1% | 39 | 0.8486 | 0.4668 |
| 847_D_−1 | C | 16.5% | 136 | 18.6% | 35 | 0.7215 | 0.8339 |
| 847_C_+1 | G | 17.8% | 132 | 21.3% | 40 | 0.5130 | 0.6295 |
| 847_A_2 | T | 5.4% | 140 | 5.0% | 40 | 1.0000 | 1.0000 |
| 847_A_1 | A | 1.3% | 120 | 1.3% | 40 | 1.0000 | 1.0000 |
| 874_R_+1 | T | 41.5% | 129 | 30.8% | 39 | 0.1116 | 0.2579 |
| 874_S_+1 | A | 38.0% | 137 | 44.9% | 39 | 0.2947 | 0.4876 |
| 874_T_−1 | T | 48.9% | 136 | 47.5% | 40 | 0.8989 | 0.7399 |
| 874_V_−1 | G | 16.9% | 139 | 18.8% | 40 | 0.7379 | 0.8269 |
| 803_K_3 | T | 1.1% | 140 | 3.1% | 49 | 0.1828 | 0.1812 |
| 803_K_2 | A | 0.4% | 139 | 0.0% | 49 | 1.0000 | 1.0000 |
| 803_I_1 | G | 28.6% | 117 | 25.5% | 49 | 0.5933 | 0.8653 |
| 803_I_−1 | C | 0.4% | 139 | 0.0% | 47 | 1.0000 | 1.0000 |
| 803_H_+1 | A | 25.7% | 140 | 21.9% | 48 | 0.4953 | 0.7481 |
| 803_E_+2 | A | 42.4% | 132 | 49.0% | 48 | 0.2821 | 0.4597 |
| 962_E_3 | C | 36.8% | 136 | 32.1% | 42 | 0.5150 | 0.7793 |
| 962_E_+2 | C | 12.5% | 140 | 10.0% | 45 | 0.5802 | 0.9068 |
| 962_G_4 | A | 14.0% | 132 | 8.5% | 41 | 0.2549 | 0.2572 |
| 962_G_1 | A | 25.2% | 139 | 28.9% | 45 | 0.4922 | 0.3482 |
| 962_G_2 | A | 6.4% | 140 | 10.2% | 44 | 0.2444 | 0.2270 |
| 962_G_6 | T | 21.7% | 129 | 16.7% | 42 | 0.3540 | 0.2230 |
| 962_H_+2 | A | 43.6% | 140 | 35.2% | 44 | 0.1748 | 0.2934 |
| 962_M_+2 | C | 12.4% | 137 | 7.1% | 42 | 0.2352 | 0.5149 |
| 962_P_−2 | A | 24.6% | 136 | 19.3% | 44 | 0.3843 | 0.6062 |
| 962_Q_−1 | A | 24.8% | 139 | 20.2% | 42 | 0.4650 | 0.5108 |
| 962_S_−1 | C | 10.9% | 137 | 6.8% | 44 | 0.3107 | 0.7140 |
| 962_U_1 | A | 3.7% | 136 | 4.5% | 44 | 0.7524 | 0.7481 |
| 962_U_2 | T | 25.0% | 136 | 17.4% | 43 | 0.1868 | 0.3713 |
| 962_V_−1 | T | 34.4% | 122 | 25.0% | 42 | 0.1357 | 0.1353 |
| 962_V_+2 | A | 4.5% | 134 | 2.3% | 44 | 0.5311 | 0.7988 |
| 962_Z_1 | T | 30.0% | 140 | 40.0% | 45 | 0.0924 | 0.0467 |

[0359] TABLE 14
ASSOCIATION ANALYSIS OF
BHR PHENOTYPE US POPULATION
US population

| | | | FREQUENCIES | | | ALLELE | GENOTYPE |
|---|---|---|---|---|---|---|---|
| GENE_EXON | ALLELE | CNTL | N | CASE | N | P-VALUE | P-VALUE |
| 845_R_1 | A | 17.1% | 76 | 0.0% | 6 | 0.2168 | 0.2965 |
| 845_R_−1 | T | 32.5% | 77 | 35.7% | 7 | 0.7742 | 0.6790 |
| 845_P_+1 | T | 6.5% | 77 | 21.4% | 7 | 0.0801 | 0.1254 |
| 845_K_1 | T | 0.0% | 75 | 0.0% | 7 | 1.0000 | 1.0000 |
| 845_K_−2 | A | 32.5% | 77 | 35.7% | 7 | 0.7742 | 0.6790 |
| 845_J_1 | G | 30.9% | 76 | 42.9% | 7 | 0.3787 | 0.5066 |
| 845_J_−1 | C | 36.4% | 77 | 21.4% | 7 | 0.3830 | 0.5888 |
| 845_I_−1 | C | 13.3% | 64 | 14.3% | 7 | 1.0000 | 0.7087 |
| 845_H_+1 | G | 20.1% | 77 | 0.0% | 7 | 0.0752 | 0.1660 |
| 845_H_−1 | T | 48.1% | 77 | 57.1% | 7 | 0.5841 | 0.7769 |
| 845_G_+1 | T | 13.2% | 76 | 14.3% | 7 | 1.0000 | 0.7054 |
| 845_F_+1 | T | 17.5% | 77 | 14.3% | 7 | 1.0000 | 1.0000 |
| 845_D_1 | T | 0.7% | 76 | 0.0% | 6 | 1.0000 | 1.0000 |
| 845_D_−1 | T | 11.0% | 77 | 16.7% | 6 | 0.6307 | 0.6162 |
| 847_K_1 | A | 7.3% | 75 | 0.0% | 8 | 0.6027 | 0.5892 |
| 847_J_+1 | T | 8.4% | 77 | 0.0% | 8 | 0.6146 | 0.3488 |
| 847_E_+1 | C | 12.3% | 77 | 0.0% | 7 | 0.3721 | 0.3417 |
| 847_D_−1 | C | 17.6% | 74 | 0.0% | 8 | 0.0779 | 0.2076 |
| 847_C_+1 | G | 18.2% | 77 | 0.0% | 8 | 0.0770 | 0.1869 |
| 847_A_2 | T | 9.1% | 77 | 0.0% | 8 | 0.3669 | 0.3423 |
| 847_A_1 | A | 0.7% | 72 | 0.0% | 8 | 1.0000 | 1.0000 |
| 874_R_+1 | T | 37.0% | 73 | 21.4% | 7 | 0.3818 | 0.6663 |
| 874_S_+1 | A | 42.2% | 77 | 31.3% | 8 | 0.4382 | 0.6119 |
| 874_T_−1 | T | 48.1% | 77 | 43.8% | 8 | 0.7977 | 0.6137 |
| 874_V_−1 | G | 18.8% | 77 | 18.8% | 8 | 1.0000 | 0.7807 |
| 803_K_3 | T | 0.6% | 78 | 0.0% | 9 | 1.0000 | 1.0000 |
| 803_K_2 | A | 0.0% | 78 | 5.6% | 9 | 0.1034 | 0.1034 |
| 803_I_1 | G | 27.6% | 78 | 44.4% | 9 | 0.1714 | 0.2111 |
| 803_I_−1 | C | 0.0% | 78 | 0.0% | 9 | 1.0000 | 1.0000 |
| 803_H_+1 | A | 24.4% | 78 | 22.2% | 9 | 1.0000 | 0.8463 |
| 803_E_+2 | A | 47.4% | 76 | 33.3% | 9 | 0.3214 | 0.6636 |
| 962_E_3 | C | 33.6% | 76 | 50.0% | 7 | 0.2478 | 0.1841 |
| 962_E_+2 | C | 13.0% | 77 | 0.0% | 7 | 0.3791 | 0.1892 |
| 962_G_4 | A | 12.9% | 70 | 7.1% | 7 | 1.0000 | 1.0000 |
| 962_G_1 | A | 30.8% | 78 | 35.7% | 7 | 0.7656 | 0.6406 |
| 962_G_2 | A | 9.7% | 77 | 0.0% | 7 | 0.6172 | 0.3425 |
| 962_G_6 | T | 17.7% | 65 | 7.1% | 7 | 0.4658 | 1.0000 |
| 962_H_+2 | A | 37.7% | 77 | 35.7% | 7 | 1.0000 | 0.2819 |
| 962_M_+2 | C | 13.2% | 76 | 14.3% | 7 | 1.0000 | 0.1122 |
| 962_P_−2 | A | 22.4% | 78 | 40.0% | 5 | 0.2469 | 0.2330 |
| 962_D_−1 | A | 21.7% | 76 | 33.3% | 6 | 0.4707 | 0.3338 |
| 962_S_−1 | C | 12.2% | 78 | 14.3% | 7 | 0.6849 | 0.1564 |
| 962_U_1 | A | 1.9% | 78 | 7.1% | 7 | 0.2932 | 0.2955 |
| 962_U_2 | T | 21.7% | 76 | 35.7% | 7 | 0.3150 | 0.2666 |
| 962_V_−1 | T | 35.4% | 65 | 35.7% | 7 | 1.0000 | 1.0000 |
| 962_V_+2 | A | 4.7% | 75 | 0.0% | 7 | 1.0000 | 1.0000 |
| 962_Z_1 | T | 35.5% | 76 | 21.4% | 7 | 0.3845 | 0.7311 |

[0360] For the BHR phenotype, two SNPs in Gene 845 reached statistical significance in the combined and the UK population alone for both the allele and the genotype tests: 50.0% of the cases in the combined population were carriers of the G allele in SNP J 1, whereas the G allele was observed in only 34.5% of the controls (combined: allele test p=0.0098, genotype test p=0.0151; UK: allele test p=0.0296, genotype test p=0.0475) and 20.2% of the cases in the combined population were carriers of the T allele in SNP D−1, whereas the T allele was observed in only 9.9% of the controls (combined: allele test p=0.0139, genotype test p=0.0083; UK: allele test p=0.0120, genotype test p=0.0069).

[0361] c. Total IqE: The analyses were performed using asthmatic children with elevated total IgE levels, as described in the Linkage Analysis section (Example 3). First, sibling pairs were identified where both sibs were affected and satisfied this new criterion. Of these pairs, one sib was included in the case/control analyses if they showed evidence of linkage at the gene of interest. This phenotype was more restrictive than the Asthma yes/no criteria; hence the number of cases included in the analyses was reduced by approximately 42%.

[0362] The significance levels (p-values) for allele and genotype association of all typed SNPs to the IgE phenotype are shown in Tables 15, 16, and 17 for the combined population and for the UK and US populations, separately. Allele frequencies are also included in the tables.

TABLE 15
ASSOCIATION ANALYSIS OF TOTAL IgE
PHENOTYPE COMBINED US/UK POPULATION
Combined US & UK

| | | | FREQUENCIES | | | ALLELE | GENOTYPE |
|---|---|---|---|---|---|---|---|
| GENE_EXON | ALLELE | CNTL | N | CASE | N | P-VALUE | P-VALUE |
| 845_R_1 | A | 14.8% | 216 | 14.1% | 64 | 0.8877 | 1.0000 |
| 845_R_−1 | T | 28.7% | 214 | 21.1% | 64 | 0.0901 | 0.2230 |
| 845_P_+1 | T | 6.5% | 217 | 10.8% | 65 | 0.1257 | 0.2366 |
| 845_K_1 | T | 0.2% | 210 | 0.0% | 59 | 1.0000 | 1.0000 |
| 845_K_−2 | A | 28.9% | 216 | 22.1% | 61 | 0.1677 | 0.3144 |
| 845_J_1 | G | 34.5% | 210 | 40.0% | 65 | 0.2952 | 0.4631 |
| 845_J_−1 | C | 37.1% | 217 | 40.0% | 65 | 0.6062 | 0.7606 |
| 845_I_−1 | C | 12.8% | 191 | 11.5% | 65 | 0.7609 | 0.8852 |
| 845_H_+1 | G | 19.6% | 217 | 16.2% | 65 | 0.4431 | 0.5034 |
| 845_H_−1 | T | 45.2% | 217 | 41.4% | 64 | 0.4795 | 0.7050 |
| 845_G_+1 | T | 13.2% | 216 | 14.6% | 65 | 0.6628 | 0.8129 |
| 845_F_+1 | T | 18.4% | 215 | 18.5% | 65 | 1.0000 | 0.5492 |
| 845_D_1 | T | 0.2% | 216 | 0.8% | 62 | 0.3966 | 0.3969 |
| 845_D_−1 | T | 9.9% | 217 | 12.1% | 62 | 0.5050 | 0.4794 |
| 847_K_1 | A | 4.9% | 214 | 5.0% | 60 | 1.0000 | 1.0000 |
| 847_J_+1 | T | 4.9% | 216 | 3.0% | 67 | 0.4732 | 0.4625 |
| 847_E_+1 | C | 12.6% | 210 | 15.2% | 66 | 0.4629 | 0.3564 |
| 847_D_−1 | C | 16.9% | 210 | 17.9% | 56 | 0.7795 | 0.6697 |
| 847_C_+1 | G | 17.9% | 209 | 21.5% | 65 | 0.3696 | 0.0887 |
| 847_A_2 | T | 6.7% | 217 | 7.5% | 67 | 0.7007 | 0.8391 |
| 847_A_1 | A | 1.0% | 192 | 0.8% | 62 | 1.0000 | 1.0000 |
| 874_R_+1 | T | 39.9% | 202 | 32.0% | 64 | 0.1181 | 0.3281 |
| 874_S_+1 | A | 39.5% | 214 | 40.4% | 68 | 0.8413 | 0.9644 |
| 874_T_−1 | T | 48.6% | 213 | 50.0% | 69 | 0.8447 | 0.9345 |
| 874_V_−1 | G | 17.6% | 216 | 21.0% | 69 | 0.3785 | 0.1676 |
| 803_K_3 | T | 0.9% | 218 | 2.2% | 67 | 0.3637 | 0.3609 |
| 803_K_2 | A | 0.2% | 217 | 1.5% | 67 | 0.1402 | 0.1397 |
| 803_I_1 | G | 28.2% | 195 | 28.8% | 66 | 0.9113 | 0.5678 |
| 803_I_−1 | C | 0.2% | 217 | 0.0% | 64 | 1.0000 | 1.0000 |
| 803_H_+1 | A | 25.2% | 218 | 23.5% | 66 | 0.7311 | 0.7690 |
| 803_E_+2 | A | 44.2% | 208 | 45.4% | 65 | 0.8402 | 0.9639 |
| 962_E_3 | C | 35.6% | 212 | 32.1% | 70 | 0.4753 | 0.4122 |
| 962_E_+2 | C | 12.7% | 217 | 6.8% | 73 | 0.0677 | 0.1672 |
| 962_G_4 | A | 13.6% | 202 | 7.1% | 70 | 0.0487 | 0.0749 |
| 962_G_1 | A | 27.2% | 217 | 37.0% | 73 | 0.0280 | 0.0472 |
| 962_G_2 | A | 7.6% | 217 | 7.7% | 71 | 1.0000 | 1.0000 |
| 962_G_6 | T | 20.4% | 194 | 16.2% | 71 | 0.3205 | 0.0794 |
| 962_H_+2 | A | 41.5% | 217 | 34.0% | 72 | 0.1170 | 0.2501 |
| 962_M_+2 | C | 12.7% | 213 | 10.7% | 70 | 0.6553 | 0.5397 |
| 962_P_−2 | A | 23.8% | 214 | 25.4% | 69 | 0.7323 | 0.4327 |
| 962_Q_−1 | A | 23.7% | 215 | 24.6% | 69 | 0.8195 | 0.8627 |
| 962_S_−1 | C | 11.4% | 215 | 8.3% | 72 | 0.3507 | 0.6768 |
| 962_U_1 | A | 3.0% | 214 | 3.6% | 70 | 0.7821 | 0.7789 |
| 962_U_2 | T | 23.8% | 212 | 23.9% | 71 | 1.0000 | 0.8648 |
| 962_V_−1 | T | 34.8% | 187 | 30.4% | 69 | 0.3994 | 0.2858 |
| 962_V_+2 | A | 4.5% | 209 | 3.5% | 72 | 0.8112 | 1.0000 |
| 962_Z_1 | T | 31.9% | 216 | 31.5% | 73 | 1.0000 | 0.5168 |

[0363] TABLE 16
ASSOCIATION ANALYSIS OF TOTAL IgE
PHENOTYPE UK POPULATION
UK population

| | | | FREQUENCIES | | | ALLELE | GENOTYPE |
|---|---|---|---|---|---|---|---|
| GENE_EXON | ALLELE | CNTL | N | CASE | N | P-VALUE | P-VALUE |
| 845_R_1 | A | 13.6% | 140 | 15.4% | 52 | 0.6245 | 0.8181 |
| 845_R_−1 | T | 26.6% | 137 | 20.2% | 52 | 0.2308 | 0.3992 |
| 845_P_+1 | T | 6.4% | 140 | 9.4% | 53 | 0.3784 | 0.3276 |
| 845_K_1 | T | 0.4% | 135 | 0.0% | 47 | 1.0000 | 1.0000 |
| 845_K_−2 | A | 27.0% | 139 | 21.0% | 50 | 0.2842 | 0.4390 |
| 845_J_1 | G | 36.6% | 134 | 40.6% | 53 | 0.4798 | 0.7186 |
| 845_J_−1 | C | 37.5% | 140 | 40.6% | 53 | 0.6392 | 0.8105 |
| 845_I_−1 | C | 12.6% | 127 | 11.3% | 53 | 0.8603 | 1.0000 |
| 845_H_+1 | G | 19.3% | 140 | 16.0% | 53 | 0.5564 | 0.4068 |
| 845_H_−1 | T | 43.6% | 140 | 39.6% | 53 | 0.4918 | 0.8043 |
| 845_G_+1 | T | 13.2% | 140 | 16.0% | 53 | 0.5116 | 0.7663 |
| 845_F_+1 | T | 18.8% | 138 | 18.9% | 53 | 1.0000 | 0.8226 |
| 845_D_1 | T | 0.0% | 140 | 1.0% | 51 | 0.2670 | 0.2670 |
| 845_D_−1 | T | 9.3% | 140 | 11.8% | 51 | 0.4474 | 0.5389 |
| 847_K_1 | A | 3.6% | 139 | 3.2% | 47 | 1.0000 | 1.0000 |
| 847_J_+1 | T | 2.9% | 139 | 2.8% | 54 | 1.0000 | 1.0000 |
| 847_E_+1 | C | 12.8% | 133 | 17.9% | 53 | 0.2494 | 0.0776 |
| 847_D_−1 | C | 16.5% | 136 | 21.6% | 44 | 0.3355 | 0.1746 |
| 847_C_+1 | G | 17.8% | 132 | 24.5% | 53 | 0.1502 | 0.0228 |
| 847_A_2 | T | 5.4% | 140 | 7.4% | 54 | 0.4740 | 0.4606 |
| 847_A_1 | A | 1.3% | 120 | 0.9% | 53 | 1.0000 | 1.0000 |
| 874_R_+1 | T | 41.5% | 129 | 33.3% | 54 | 0.1597 | 0.3907 |
| 874_S_+1 | A | 38.0% | 137 | 39.5% | 57 | 0.8191 | 0.5707 |
| 874_T_−1 | T | 48.9% | 136 | 52.6% | 58 | 0.5794 | 0.7577 |
| 874_V_−1 | G | 16.9% | 139 | 19.8% | 58 | 0.4743 | 0.4157 |
| 803_K_3 | T | 1.1% | 140 | 2.6% | 58 | 0.3645 | 0.3612 |
| 803_K_2 | A | 0.4% | 139 | 1.7% | 58 | 0.2083 | 0.2077 |
| 803_I_1 | G | 28.6% | 117 | 26.3% | 57 | 0.7033 | 0.3961 |
| 803_I_−1 | C | 0.4% | 139 | 0.0% | 55 | 1.0000 | 1.0000 |
| 803_H_+1 | A | 25.7% | 140 | 23.7% | 57 | 0.7028 | 0.8814 |
| 803_E_+2 | A | 42.4% | 132 | 48.2% | 56 | 0.3091 | 0.5632 |
| 962_E_3 | C | 36.8% | 136 | 31.0% | 58 | 0.2974 | 0.5165 |
| 962_E_+2 | C | 12.5% | 140 | 7.4% | 61 | 0.1645 | 0.3555 |
| 962_G_4 | A | 14.0% | 132 | 7.8% | 58 | 0.0904 | 0.1867 |
| 962_G_1 | A | 25.2% | 139 | 34.4% | 61 | 0.0695 | 0.1331 |
| 962_G_2 | A | 6.4% | 140 | 7.6% | 59 | 0.6660 | 0.6550 |
| 962_G_6 | T | 21.7% | 129 | 14.4% | 59 | 0.1218 | 0.0239 |
| 962_H_+2 | A | 43.6% | 140 | 35.8% | 60 | 0.1834 | 0.2912 |
| 962_M_+2 | C | 12.4% | 137 | 8.6% | 58 | 0.3811 | 0.6573 |
| 962_P_−2 | A | 24.6% | 136 | 21.2% | 59 | 0.5173 | 0.8032 |
| 962_Q_−1 | A | 24.8% | 139 | 20.7% | 58 | 0.4355 | 0.7382 |
| 962_S_−1 | C | 10.9% | 137 | 6.7% | 60 | 0.2008 | 0.4682 |
| 962_U_1 | A | 3.7% | 136 | 3.4% | 59 | 1.0000 | 1.0000 |
| 962_U_2 | T | 25.0% | 136 | 19.5% | 59 | 0.2970 | 0.6158 |
| 962_V_−1 | T | 34.4% | 122 | 31.0% | 58 | 0.5516 | 0.2373 |
| 962_V_+2 | A | 4.5% | 134 | 3.3% | 60 | 0.7845 | 1.0000 |
| 962_Z_1 | T | 30.0% | 140 | 33.6% | 61 | 0.4837 | 0.2793 |

[0364] TABLE 17
ASSOCIATION ANALYSIS OF TOTAL IgE
PHENOTYPE US POPULATION
US population

| | | | FREQUENCIES | | | ALLELE | GENOTYPE |
|---|---|---|---|---|---|---|---|
| GENE_EXON | ALLELE | CNTL | N | CASE | N | P-VALUE | P-VALUE |
| 845_R_1 | A | 17.1% | 76 | 8.3% | 12 | 0.3763 | 0.6251 |
| 845_R_−1 | T | 32.5% | 77 | 25.0% | 12 | 0.6371 | 0.8973 |
| 845_P_+1 | T | 6.5% | 77 | 16.7% | 12 | 0.1002 | 0.1818 |
| 845_K_1 | T | 0.0% | 75 | 0.0% | 12 | 1.0000 | 1.0000 |
| 845_K_−2 | A | 32.5% | 77 | 27.3% | 11 | 0.8075 | 1.0000 |
| 845_J_1 | G | 30.9% | 76 | 37.5% | 12 | 0.6376 | 0.7377 |
| 845_J_−1 | C | 36.4% | 77 | 37.5% | 12 | 1.0000 | 1.0000 |
| 845_I_−1 | C | 13.3% | 64 | 12.5% | 12 | 1.0000 | 0.7982 |
| 845_H_+1 | G | 20.1% | 77 | 16.7% | 12 | 1.0000 | 1.0000 |
| 845_H_−1 | T | 48.1% | 77 | 50.0% | 11 | 1.0000 | 0.7010 |
| 845_G_+1 | T | 13.2% | 76 | 8.3% | 12 | 0.7426 | 1.0000 |
| 845_F_+1 | T | 17.5% | 77 | 16.7% | 12 | 1.0000 | 0.8486 |
| 845_D_1 | T | 0.7% | 76 | 0.0% | 11 | 1.0000 | 1.0000 |
| 845_D_−1 | T | 11.0% | 77 | 13.6% | 11 | 0.7202 | 0.7075 |
| 847_K_1 | A | 7.3% | 75 | 11.5% | 13 | 0.4387 | 0.4273 |
| 847_J_+1 | T | 8.4% | 77 | 3.8% | 13 | 0.6961 | 0.6829 |
| 847_E_+1 | C | 12.3% | 77 | 3.8% | 13 | 0.3158 | 0.2829 |
| 847_D_−1 | C | 17.6% | 74 | 4.2% | 12 | 0.1308 | 0.3152 |
| 847_C_+1 | G | 18.2% | 77 | 8.3% | 12 | 0.3780 | 0.6757 |
| 847_A_2 | T | 9.1% | 77 | 7.7% | 13 | 1.0000 | 1.0000 |
| 847_A_1 | A | 0.7% | 72 | 0.0% | 9 | 1.0000 | 1.0000 |
| 874_R_+1 | T | 37.0% | 73 | 25.0% | 10 | 0.3317 | 0.7405 |
| 874_S_+1 | A | 42.2% | 77 | 45.5% | 11 | 0.8201 | 0.4213 |
| 874_T_−1 | T | 48.1% | 77 | 36.4% | 11 | 0.3647 | 0.3947 |
| 874_V_−1 | G | 18.8% | 77 | 27.3% | 11 | 0.3924 | 0.2974 |
| 803_K_3 | T | 0.6% | 78 | 0.0% | 9 | 1.0000 | 1.0000 |
| 803_K_2 | A | 0.0% | 78 | 0.0% | 9 | 1.0000 | 1.0000 |
| 803_I_1 | G | 27.6% | 78 | 44.4% | 9 | 0.1714 | 0.2111 |
| 803_I_−1 | C | 0.0% | 78 | 0.0% | 9 | 1.0000 | 1.0000 |
| 803_H_+1 | A | 24.4% | 78 | 22.2% | 9 | 1.0000 | 0.8463 |
| 803_E_+2 | A | 47.4% | 76 | 27.8% | 9 | 0.1375 | 0.3483 |
| 962_E_3 | C | 33.6% | 76 | 37.5% | 12 | 0.8172 | 0.5320 |
| 962_E_+2 | C | 13.0% | 77 | 4.2% | 12 | 0.3160 | 0.2803 |
| 962_G_4 | A | 12.9% | 70 | 4.2% | 12 | 0.3133 | 0.5253 |
| 962_G_1 | A | 30.8% | 78 | 50.0% | 12 | 0.1014 | 0.0734 |
| 962_G_2 | A | 9.7% | 77 | 8.3% | 12 | 1.0000 | 1.0000 |
| 962_G_6 | T | 17.7% | 65 | 25.0% | 12 | 0.4013 | 0.5214 |
| 962_H_+2 | A | 37.7% | 77 | 25.0% | 12 | 0.2614 | 0.6315 |
| 962_M_+2 | C | 13.2% | 76 | 20.8% | 12 | 0.3451 | 0.0838 |
| 962_P_−2 | A | 22.4% | 78 | 50.0% | 10 | 0.0130 | 0.0116 |
| 962_Q_−1 | A | 21.7% | 76 | 45.5% | 11 | 0.0309 | 0.0261 |
| 962_S_−1 | C | 12.2% | 78 | 16.7% | 12 | 0.5172 | 0.5073 |
| 962_U_1 | A | 1.9% | 78 | 4.5% | 11 | 0.4129 | 0.4158 |
| 962_U_2 | T | 21.7% | 76 | 45.8% | 12 | 0.0201 | 0.0233 |
| 962_V_−1 | T | 35.4% | 65 | 27.3% | 11 | 0.6278 | 0.8097 |
| 962_V_+2 | A | 4.7% | 75 | 4.2% | 12 | 1.0000 | 1.0000 |
| 962_Z_1 | T | 35.5% | 76 | 20.8% | 12 | 0.2438 | 0.4274 |

[0365] For the total IgE phenotype, a single SNP in Gene 847 reached statistical significance in the UK population alone: SNP C+1. For this SNP, 24.5% of the cases were carriers of the G allele, whereas the G allele was observed in only 17.8% of the controls (genotype test p=0.0228). Six SNPs in Gene 962 reached statistical significance in the combined and the US population alone for both allele and genotype tests: 92.9% of the cases were carriers of the G allele in SNP G 4, whereas the G allele was observed in only 86.4% of the controls (combined: allele test p=0.0487), 37.0% of the cases were carriers of the A allele in SNP G 1, whereas the A allele was observed in only 27.2% of the controls (combined: allele test p=0.0280, genotype test p=0.0472), 85.6% of the cases were carriers of the C allele in SNP G 6, whereas the C allele was observed in only 78.3% of the controls (UK: genotype test p=0.0239), 50.0% of the cases were carriers of the A allele in SNP P−2, whereas the A allele was observed in only 22.4% of the controls (US: allele test p=0.0130, genotype test p=0.0116), 45.5% of the cases were carriers of the A allele in SNP Q−1, whereas the A allele was observed in only 21.7% of the controls (US: allele test p=0.0309, genotype test p=0.0261) and 45.8% of the cases were carriers of the T allele in SNP U 2, whereas the T allele was observed in only 21.7% of the controls (US: allele test p=0.0201 and genotype test p=0.0233).

[0366] d. Specific IgE: The analyses were performed using asthmatic children with elevated specific IgE levels for at least one allergen, as described in the Linkage Analysis section (Example 3). First, sibling pairs were identified where both sibs were affected and satisfied this new criterion. Of these pairs, one sib was included in the case/control analyses if they showed evidence of linkage at the gene of interest. This phenotype was more restrictive than the Asthma yes/no criteria; hence the number of cases included in the analyses was reduced by approximately 38%.

[0367] Frequencies and p-values for all typed SNPs are shown in Tables 18, 19 and 20 or the combined population and for the UK and US populations, separately.

TABLE 18
ASSOCIATION ANALYSIS OF SPECIFIC IgE
PHENOTYPE COMBINED US/UK POPULATION
Combined US & UK

| | | | FREQUENCIES | | | ALLELE | GENOTYPE |
|---|---|---|---|---|---|---|---|
| GENE_EXON | ALLELE | CNTL | N | CASE | N | P-VALUE | P-VALUE |
| 845_R_1 | A | 14.8% | 216 | 10.2% | 59 | 0.2296 | 0.3695 |
| 845_R_−1 | T | 28.7% | 214 | 24.2% | 60 | 0.3572 | 0.5546 |
| 845_P_+1 | T | 6.5% | 217 | 14.2% | 60 | 0.0126 | 0.0172 |
| 845_K_1 | T | 0.2% | 210 | 0.0% | 57 | 1.0000 | 1.0000 |
| 845_K_−2 | A | 28.9% | 216 | 24.6% | 57 | 0.4121 | 0.6113 |
| 845_J_1 | G | 34.5% | 210 | 43.3% | 60 | 0.0856 | 0.1956 |
| 845_J_−1 | C | 37.1% | 217 | 32.5% | 60 | 0.3910 | 0.5375 |
| 845_I_−1 | C | 12.8% | 191 | 11.7% | 60 | 0.8746 | 1.0000 |
| 845_H_+1 | G | 19.6% | 217 | 13.3% | 60 | 0.1414 | 0.2742 |
| 845_H_−1 | T | 45.2% | 217 | 40.7% | 59 | 0.4045 | 0.7192 |
| 845_G_+1 | T | 13.2% | 216 | 14.2% | 60 | 0.7635 | 0.8468 |
| 845_F_+1 | T | 18.4% | 215 | 19.2% | 60 | 0.8944 | 0.8931 |
| 845_D_1 | T | 0.2% | 216 | 0.9% | 57 | 0.3743 | 0.3746 |
| 845_D_−1 | T | 9.9% | 217 | 15.8% | 57 | 0.0931 | 0.0646 |
| 847_K_1 | A | 4.9% | 214 | 4.3% | 58 | 1.0000 | 1.0000 |
| 847_J_+1 | T | 4.9% | 216 | 1.6% | 64 | 0.1282 | 0.1200 |
| 847_E_+1 | C | 12.6% | 210 | 15.1% | 63 | 0.4567 | 0.3427 |
| 847_D_−1 | C | 16.9% | 210 | 17.6% | 54 | 0.8861 | 0.6933 |
| 847_C_+1 | G | 17.9% | 209 | 21.4% | 63 | 0.4345 | 0.1027 |
| 847_A_2 | T | 6.7% | 217 | 7.8% | 64 | 0.6925 | 0.6816 |
| 847_A_1 | A | 1.0% | 192 | 0.8% | 60 | 1.0000 | 1.0000 |
| 874_R_+1 | T | 39.9% | 202 | 32.5% | 60 | 0.1645 | 0.3165 |
| 874_S_+1 | A | 39.5% | 214 | 41.4% | 64 | 0.7578 | 0.8934 |
| 874_T_−1 | T | 48.6% | 213 | 49.2% | 65 | 0.9204 | 0.8841 |
| 874_V_−1 | G | 17.6% | 216 | 18.5% | 65 | 0.7951 | 0.5295 |
| 803_K_3 | T | 0.9% | 218 | 0.8% | 67 | 1.0000 | 1.0000 |
| 803_K_2 | A | 0.2% | 217 | 1.5% | 67 | 0.1402 | 0.1397 |
| 803_I_1 | G | 28.2% | 195 | 27.3% | 66 | 0.9108 | 0.6849 |
| 803_I_−1 | C | 0.2% | 217 | 0.0% | 64 | 1.0000 | 1.0000 |
| 803_H_+1 | A | 25.2% | 218 | 25.8% | 66 | 0.9094 | 0.8564 |
| 803_E_+2 | A | 44.2% | 208 | 44.6% | 65 | 1.0000 | 0.9816 |
| 962_E_3 | C | 35.6% | 212 | 33.1% | 65 | 0.6744 | 0.4216 |
| 962_E_+2 | C | 12.7% | 217 | 8.7% | 69 | 0.2273 | 0.2212 |
| 962_G_4 | A | 13.6% | 202 | 7.7% | 65 | 0.0891 | 0.0249 |
| 962_G_1 | A | 27.2% | 217 | 37.7% | 69 | 0.0245 | 0.0218 |
| 962_G_2 | A | 7.6% | 217 | 8.1% | 68 | 0.8546 | 0.3300 |
| 962_G_6 | T | 20.4% | 194 | 18.2% | 66 | 0.6158 | 0.5068 |
| 962_H_+2 | A | 41.5% | 217 | 35.3% | 68 | 0.2288 | 0.2945 |
| 962_M_+2 | C | 12.7% | 213 | 6.2% | 65 | 0.0389 | 0.0079 |
| 962_P_−2 | A | 23.8% | 214 | 28.0% | 66 | 0.3568 | 0.4360 |
| 962_Q_−1 | A | 23.7% | 215 | 28.1% | 64 | 0.3505 | 0.4884 |
| 962_S_−1 | C | 11.4% | 215 | 3.7% | 68 | 0.0068 | 0.0046 |
| 962_U_1 | A | 3.0% | 214 | 4.6% | 65 | 0.4086 | 0.4012 |
| 962_U_2 | T | 23.8% | 212 | 25.4% | 67 | 0.7291 | 0.8795 |
| 962_V_−1 | T | 34.8% | 187 | 31.1% | 66 | 0.4560 | 0.5715 |
| 962_V_+2 | A | 4.5% | 209 | 3.7% | 68 | 0.8108 | 1.0000 |
| 962_Z_1 | T | 31.9% | 216 | 28.3% | 69 | 0.4601 | 0.2792 |

[0368] TABLE 19
ASSOCIATION ANALYSIS OF SPECIFIC IgE
PHENOTYPE UK POPULATION
UK population

| | | | FREQUENCIES | | | ALLELE | GENOTYPE |
|---|---|---|---|---|---|---|---|
| GENE_EXON | ALLELE | CNTL | N | CASE | N | P-VALUE | P-VALUE |
| 845_R_1 | A | 13.6% | 140 | 11.6% | 43 | 0.7179 | 0.8612 |
| 845_R_−1 | T | 26.6% | 137 | 22.7% | 44 | 0.4875 | 0.8214 |
| 845_P_+1 | T | 6.4% | 140 | 12.5% | 44 | 0.0724 | 0.0938 |
| 845_K_1 | T | 0.4% | 135 | 0.0% | 41 | 1.0000 | 1.0000 |
| 845_K_−2 | A | 27.0% | 139 | 23.3% | 43 | 0.5747 | 0.8190 |
| 845_J_1 | G | 36.6% | 134 | 43.2% | 44 | 0.3119 | 0.5431 |
| 845_J_−1 | C | 37.5% | 140 | 34.1% | 44 | 0.6131 | 0.7816 |
| 845_I_−1 | C | 12.6% | 127 | 11.4% | 44 | 0.8520 | 1.0000 |
| 845_H_+1 | G | 19.3% | 140 | 13.6% | 44 | 0.2667 | 0.4230 |
| 845_H_−1 | T | 43.6% | 140 | 38.6% | 44 | 0.4590 | 0.4785 |
| 845_G_+1 | T | 13.2% | 140 | 15.9% | 44 | 0.5956 | 0.7510 |
| 845_F_+1 | T | 18.8% | 138 | 20.5% | 44 | 0.7570 | 0.8585 |
| 845_D_1 | T | 0.0% | 140 | 1.2% | 43 | 0.2350 | 0.2350 |
| 845_D_−1 | T | 9.3% | 140 | 15.1% | 43 | 0.1601 | 0.1350 |
| 847_K_1 | A | 3.6% | 139 | 2.5% | 40 | 1.0000 | 1.0000 |
| 847_J_+1 | T | 2.9% | 139 | 1.1% | 46 | 0.4610 | 0.4549 |
| 847_E_+1 | C | 12.8% | 133 | 18.9% | 45 | 0.1653 | 0.0766 |
| 847_D_−1 | C | 16.5% | 136 | 23.1% | 39 | 0.1853 | 0.1186 |
| 847_C_+1 | G | 17.8% | 132 | 26.1% | 46 | 0.0964 | 0.0143 |
| 847_A_2 | T | 5.4% | 140 | 6.5% | 46 | 0.6132 | 0.7884 |
| 847_A_1 | A | 1.3% | 120 | 1.1% | 46 | 1.0000 | 1.0000 |
| 874_R_+1 | T | 41.5% | 129 | 32.3% | 48 | 0.1412 | 0.2670 |
| 874_S_+1 | A | 38.0% | 137 | 40.2% | 51 | 0.7215 | 0.9056 |
| 874_T_−1 | T | 48.9% | 136 | 51.0% | 52 | 0.7309 | 0.9130 |
| 874_V_−1 | G | 16.9% | 139 | 18.3% | 52 | 0.7623 | 0.6537 |
| 803_K_3 | T | 1.1% | 140 | 0.9% | 53 | 1.0000 | 1.0000 |
| 803_K_2 | A | 0.4% | 139 | 0.9% | 53 | 0.4764 | 0.4769 |
| 803_I_1 | G | 28.6% | 117 | 24.0% | 52 | 0.4281 | 0.5565 |
| 803_I_−1 | C | 0.4% | 139 | 0.0% | 50 | 1.0000 | 1.0000 |
| 803_H_+1 | A | 25.7% | 140 | 26.0% | 52 | 1.0000 | 0.8447 |
| 803_E_+2 | A | 42.4% | 132 | 48.0% | 51 | 0.3491 | 0.5519 |
| 962_E_3 | C | 36.8% | 136 | 30.0% | 50 | 0.2697 | 0.3867 |
| 962_E_+2 | C | 12.5% | 140 | 8.5% | 53 | 0.3692 | 0.3657 |
| 962_G_4 | A | 14.0% | 132 | 8.2% | 49 | 0.1539 | 0.0449 |
| 962_G_1 | A | 25.2% | 139 | 34.9% | 53 | 0.0742 | 0.0681 |
| 962_G_2 | A | 6.4% | 140 | 8.7% | 52 | 0.5009 | 0.3792 |
| 962_G_6 | T | 21.7% | 129 | 15.0% | 50 | 0.1841 | 0.1382 |
| 962_H_+2 | A | 43.6% | 140 | 36.5% | 52 | 0.2445 | 0.2880 |
| 962_M_+2 | C | 12.4% | 137 | 3.0% | 50 | 0.0056 | 0.0165 |
| 962_P_−2 | A | 24.6% | 136 | 24.0% | 52 | 1.0000 | 1.0000 |
| 962_Q_−1 | A | 24.8% | 139 | 24.5% | 49 | 1.0000 | 0.9376 |
| 962_S_−1 | C | 10.9% | 137 | 1.0% | 52 | 0.0006 | 0.0025 |
| 962_U_1 | A | 3.7% | 136 | 4.9% | 51 | 0.5642 | 0.5575 |
| 962_U_2 | T | 25.0% | 136 | 20.6% | 51 | 0.4151 | 0.7659 |
| 962_V_−1 | T | 34.4% | 122 | 29.4% | 51 | 0.3829 | 0.1817 |
| 962_V_+2 | A | 4.5% | 134 | 3.8% | 52 | 1.0000 | 1.0000 |
| 962_Z_1 | T | 30.0% | 140 | 32.1% | 53 | 0.7114 | 0.1780 |

[0369] TABLE 20
ASSOCIATION ANALYSIS OF SPECIFIC IgE
PHENOTYPE US POPULATION
US population

| | | | FREQUENCIES | | | ALLELE | GENOTYPE |
|---|---|---|---|---|---|---|---|
| GENE_EXON | ALLELE | CNTL | N | CASE | N | P-VALUE | P-VALUE |
| 845_R_1 | A | 17.1% | 76 | 6.3% | 16 | 0.1750 | 0.3956 |
| 845_R_−1 | T | 32.5% | 77 | 28.1% | 16 | 0.6822 | 0.7490 |
| 845_P_+1 | T | 6.5% | 77 | 18.8% | 16 | 0.0362 | 0.0814 |
| 845_K_1 | T | 0.0% | 75 | 0.0% | 16 | 1.0000 | 1.0000 |
| 845_K_−2 | A | 32.5% | 77 | 28.6% | 14 | 0.8264 | 0.7366 |
| 845_J_1 | G | 30.9% | 76 | 43.8% | 16 | 0.2144 | 0.3882 |
| 845_J_−1 | C | 36.4% | 77 | 28.1% | 16 | 0.4212 | 0.6502 |
| 845_I_−1 | C | 13.3% | 64 | 12.5% | 16 | 1.0000 | 0.8344 |
| 845_H_+1 | G | 20.1% | 77 | 12.5% | 16 | 0.4562 | 0.5019 |
| 845_H_−1 | T | 48.1% | 77 | 46.7% | 15 | 1.0000 | 0.4033 |
| 845_G_+1 | T | 13.2% | 76 | 9.4% | 16 | 0.7705 | 1.0000 |
| 845_F_+1 | T | 17.5% | 77 | 15.6% | 16 | 1.0000 | 0.8876 |
| 845_D_1 | T | 0.7% | 76 | 0.0% | 14 | 1.0000 | 1.0000 |
| 845_D_−1 | T | 11.0% | 77 | 17.9% | 14 | 0.3432 | 0.2166 |
| 847_K_1 | A | 7.3% | 75 | 8.3% | 18 | 0.7364 | 1.0000 |
| 847_J_+1 | T | 8.4% | 77 | 2.8% | 18 | 0.4757 | 0.2939 |
| 847_E_+1 | C | 12.3% | 77 | 5.6% | 18 | 0.3765 | 0.3445 |
| 847_D_−1 | C | 17.6% | 74 | 3.3% | 15 | 0.0516 | 0.1501 |
| 847_C_+1 | G | 18.2% | 77 | 8.8% | 17 | 0.2134 | 0.5739 |
| 847_A_2 | T | 9.1% | 77 | 11.1% | 18 | 0.7523 | 0.7410 |
| 847_A_1 | A | 0.7% | 72 | 0.0% | 14 | 1.0000 | 1.0000 |
| 874_R_+1 | T | 37.0% | 73 | 33.3% | 12 | 0.8215 | 1.0000 |
| 874_S_+1 | A | 42.2% | 77 | 46.2% | 13 | 0.8308 | 0.7845 |
| 874_T_−1 | T | 48.1% | 77 | 42.3% | 13 | 0.6733 | 0.8501 |
| 874_V_−1 | G | 18.8% | 77 | 19.2% | 13 | 1.0000 | 0.8434 |
| 803_K_3 | T | 0.6% | 78 | 0.0% | 14 | 1.0000 | 1.0000 |
| 803_K_2 | A | 0.0% | 78 | 3.6% | 14 | 0.1522 | 0.1522 |
| 803_I_1 | G | 27.6% | 78 | 39.3% | 14 | 0.2596 | 0.3122 |
| 803_I_−1 | C | 0.0% | 78 | 0.0% | 14 | 1.0000 | 1.0000 |
| 803_H_+1 | A | 24.4% | 78 | 25.0% | 14 | 1.0000 | 1.0000 |
| 803_E_+2 | A | 47.4% | 76 | 32.1% | 14 | 0.1529 | 0.3421 |
| 962_E_3 | C | 33.6% | 76 | 43.3% | 15 | 0.3050 | 0.3833 |
| 962_E_+2 | C | 13.0% | 77 | 9.4% | 16 | 0.7706 | 0.7526 |
| 962_G_4 | A | 12.9% | 70 | 6.3% | 16 | 0.3748 | 0.5960 |
| 962_G_1 | A | 30.8% | 78 | 46.9% | 16 | 0.0999 | 0.1238 |
| 962_G_2 | A | 9.7% | 77 | 6.3% | 16 | 0.7414 | 0.7273 |
| 962_G_6 | T | 17.7% | 65 | 28.1% | 16 | 0.2160 | 0.3921 |
| 962_H_+2 | A | 37.7% | 77 | 31.3% | 16 | 0.5501 | 0.8134 |
| 962_M_+2 | C | 13.2% | 76 | 16.7% | 15 | 0.5704 | 0.1201 |
| 962_P_−2 | A | 22.4% | 78 | 42.9% | 14 | 0.0329 | 0.0244 |
| 962_Q_−1 | A | 21.7% | 76 | 40.0% | 15 | 0.0398 | 0.0619 |
| 962_S_−1 | C | 12.2% | 78 | 12.5% | 16 | 1.0000 | 0.4985 |
| 962_U_1 | A | 1.9% | 78 | 3.6% | 14 | 0.4864 | 0.4895 |
| 962_U_2 | T | 21.7% | 76 | 40.6% | 16 | 0.0411 | 0.0456 |
| 962_V_−1 | T | 35.4% | 65 | 36.7% | 15 | 1.0000 | 0.4874 |
| 962_V_+2 | A | 4.7% | 75 | 3.1% | 16 | 1.0000 | 1.0000 |
| 962_Z_1 | T | 35.5% | 76 | 15.6% | 16 | 0.0362 | 0.0826 |

[0370] For the specific IgE phenotype, a single SNP in Gene 845 reached statistical significance in the combined and the US population alone for both the allele and the genotype tests: SNP P+1. For this SNP, 14.2% of the cases in the combined population were carriers of the T allele, whereas the T allele was observed in only 6.5% of the controls (combined:

[0371] allele test p=0.0126, genotype test p=0.0172; US: allele test p=0.0362). A single SNP in Gene 847 reached statistical significance in the UK population alone: SNP C+1. For this SNP, 26.1% of the cases were carriers of the G allele, whereas the G allele was observed in only 17.8% of the controls (UK: genotype test p=0.0143). Eight SNPs in Gene 962 reached statistical significance in the combined, the UK population alone and the US population alone for the allele and the genotype tests: 92.3% of the cases in the combined population were carriers of the G allele in SNP G 4, whereas the G allele was observed in only 86.4% of the controls (combined: genotype test p=0.0249; UK: genotype test p=0.0449), 37.7% of the cases were carriers of the A allele in SNP G 1, whereas the A allele was observed in only 27.2% of the controls (combined: allele p=0.0245, genotype p=0.0218), 93.8% of the cases in the combined population were carriers of the G allele in SNP M+2, whereas the G allele was observed in only 87.3% of the controls (combined: allele test p=0.0389, genotype test p=0.0079; UK: allele test p=0.0056, genotype test p=0.0165), 42.9% of the cases were carriers of the A allele in SNP P−2, whereas the A allele was observed in only 22.4% of the controls (US: allele test p=0.0329, genotype test p=0.0244), 40.0% of the cases were carriers of the A allele in SNP Q−1, whereas the A allele was observed in only 21.7% of the controls (US: allele test p=0.0398), 96.3% of the cases in the combined population were carriers of the G allele in SNP S−1, whereas the G allele was observed in only 88.6% of the controls (combined: allele test p=0.0068, genotype test p=0.0046; UK: allele test p=0.0006, genotype test p=0.0025), 40.6% of the cases were carriers of the T allele in SNP U 2, whereas the T allele was observed in only 21.7% of the controls (US: allele p=0.0411, genotype p=0.0456) and 84.4% of the cases were carriers of the C allele in SNP Z 1, whereas the C allele was observed in only 64.5% of the controls (US: allele test p=0.0362).

[0372] 3. Association Test with SNP Combinations:

[0373] In addition to the analysis of individual SNPs, haplotype frequencies between the case and control groups were also compared. The haplotypes were constructed using a maximum likelihood approach. Existing software for predicting haplotypes was unable to utilize individuals with missing data. Accordingly, a program was developed to make use of all individuals. This allowed more accurate estimates of haplotype frequency. Haplotype analysis based on multiple SNPs in a gene was expected to provide increased evidence for an association between a given phenotype and that gene, if all haplotyped SNPs were involved in the characterization of the phenotype. Otherwise, allelic variation involving those haplotyped SNPs would not be associated more significantly with different risks or susceptibilities toward the phenotype.

[0374] a. Asthma Phenotype:

[0375] The estimated frequencies of each haplotype for cases and controls were compared using a permutation test. An overall comparison of the distribution of all haplotypes between the two groups was also performed. In Tables 21, 22 and 23 the haplotype analysis (2-at-a-time) is presented for the combined, the UK and the US populations, respectively. The diagonal entries represent the single SNP p-values, while the other entries are the p-values for a test of association between the asthma phenotype and the haplotypes defined by the 2 SNPs listed on the horizontal and vertical axes. The frequencies of the individual SNPs in the cases and controls are shown at the bottom of the tables. Colored cells indicate p-values that were statistically significant (light gray: 0.01 to 0.05, dark gray: 0.001 to 0.0099, black: <0.001). We highlight those combinations that are significant at the 0.05 level and that are more significant than the two tests involving each of the constituent SNPs alone (diagonal entries). One SNP combination in Gene 845 is significant in the US population: SNPs R 1 & K−2 (p=0.0443). Four SNP combinations in Gene 803 are significant in the US population: SNPs K 3 & K 2 (p=0.0409), SNPs K 2 & I 1 (p=0.0146), SNPs K 2 & I−1 (p=0.0383), SNPs K 2 & E+2 (p=0.0197). Thirteen SNP combinations in Gene 962 are significant in the combined, the UK and the US population alone: SNPs E+2 & V−1 (UK p=0.0362), SNPs G 4 & G 1 (combined p=0.0472), SNPs G 4 & P−2 (US p=0.0174), SNPs G 4 & Q−1 (US p=0.016), SNPs G 4 & U 2 (US p=0.013) SNPs G 4 & V+2 (US p=0.0188), SNPs G 1 & G 6 (UK p=0.0369), SNPs G 1 & Q−1 (combined p=0.0441; US p=0.0197), SNPs G 1 & U 2 (US p=0.016), SNPs G 1 & V−1 (combined p=0.0311), SNPs G 6 & S−1 (UK p=0.038), SNPs H+2 & S−1 (combined p=0.0492) and SNPs U 2 & V+2 (US p=0.0212).

TABLE 21
HAPLOTYPE ANALYSIS OF ASTHMA PHENOTYPE COMBINED US/UK POPULATION

| | 845_R_1 | 845_R_−1 | 845_P_+1 | 845_K_1 | 845_K_−2 | 845_J_1 | 845_J_−1 | 845_l_−1′ | 845_H_+1 | 845_H_−1 | 845_G_+1 | 845_F_+1 | 845_D_1 | 845_D_−1 | |
|---|---|---|---|---|---|---|---|---|---|---|---|---|---|---|---|
| 845_{—} | 0.4634 | 0.4245 | 0.3666 | 0.619 | 0.2116 | 0.5313 | 0.555 | 0.6457 | 0.3764 | 0.7213 | 0.6732 | 0.6692 | 0.3245 | 0.7027 | 845_R_1 |
| R_1 | | | | | | | | | | | | | | | |
| 845_{—} | — | 0.507 | 0.387 | 0.665 | 0.1628 | 0.2303 | 0.721 | 0.8127 | 0.1361 | 0.17 | 0.846 | 0.8137 | 0.5012 | 0.6587 | 845_R_−1 |
| R_−1 | | | | | | | | | | | | | | | |
| 845_{—} | — | — | 0.1998 | 0.3458 | 0.2262 | 0.646 | 0.6124 | 0.3427 | 0.1955 | 0.5843 | 0.4044 | 0.4398 | 0.2971 | 0.5948 | 845_P_+1 |
| P_+1 | | | | | | | | | | | | | | | |
| 845_{—} | — | — | — | 1 | 0.3967 | 0.5143 | 0.8472 | 0.7931 | 0.2278 | 0.9613 | 0.8108 | 0.9055 | 0.4205 | 0.7815 | 845_K_1 |
| K_1 | | | | | | | | | | | | | | | |
| 845_{—} | — | — | — | — | 0.2103 | 0.3312 | 0.4067 | 0.2975 | 0.0555 | 0.1066 | 0.438 | 0.33 | 0.2143 | 0.4 | 845_K_−2 |
| K_−2 | | | | | | | | | | | | | | | |
| 845_{—} | — | — | — | — | — | 0.3296 | 0.2547 | 0.3243 | 0.3114 | 0.6043 | 0.4215 | 0.6475 | 0.2175 | 0.3693 | 845_J_1 |
| J_1 | | | | | | | | | | | | | | | |
| 845_{—} | — | — | — | — | — | — | 0.794 | 0.89 | 0.0977 | 0.4639 | 0.8126 | 0.9791 | 0.5486 | 0.8222 | 845_J_−1 |
| J_−1 | | | | | | | | | | | | | | | |
| 845_{—} | — | — | — | — | — | — | — | 0.6962 | 0.2455 | 0.8919 | 0.5241 | 0.4525 | 0.5393 | 0.3813 | 845_I_−1 |
| I_−1 | | | | | | | | | | | | | | | |
| 845_{—} | — | — | — | — | — | — | — | — | 0.1559 | 0.3291 | 0.356 | 0.5486 | 0.1114 | 0.3007 | 845_H_+1 |
| H_+1 | | | | | | | | | | | | | | | |
| 845_{—} | — | — | — | — | — | — | — | — | — | 0.865 | 0.9607 | 0.8998 | 0.6117 | 0.9736 | 845_H_−1 |
| H_−1 | | | | | | | | | | | | | | | |
| 845_{—} | — | — | — | — | — | — | — | — | — | — | 0.8053 | 0.5316 | 0.5733 | 0.5129 | 845_G_+1 |
| G_+1 | | | | | | | | | | | | | | | |
| 845_{—} | — | — | — | — | — | — | — | — | — | — | — | 0.913 | 0.5852 | 0.8162 | 845_F_+1 |
| F_+1 | | | | | | | | | | | | | | | |
| 845_{—} | — | — | — | — | — | — | — | — | — | — | — | — | 0.2339 | 0.5455 | 845_D_1 |
| D_1 | | | | | | | | | | | | | | | |
| 845_{—} | — | — | — | — | — | — | — | — | — | — | — | — | — | 0.6727 | 845_D_−1 |
| D_−1 | | | | | | | | | | | | | | | |
| CNTL | 14.8% | 28.7% | 6.5% | 0.2% | 28.9% | 34.5% | 37.1% | 12.8% | 19.6% | 45.2% | 13.2% | 18.4% | 0.2% | 9.9% | CNTL |
| CASE | 12.5% | 26.0% | 9.5% | 0.0% | 24.0% | 38.8% | 38.5% | 11.5% | 14.9% | 44.2% | 13.9% | 17.6% | 1.0% | 11.1% | CASE |

| | 847_K_1 | 847_J_+1 | 847_E_+1 | 847_D_−1 | 847_C_+1 | 847_A_2 | 847_A_1 | |
|---|---|---|---|---|---|---|---|---|
| 847_K_1 | 0.6976 | 0.2577 | 0.5741 | 0.8309 | 0.6644 | 0.5754 | 0.6198 | 847_K_1 |
| 847_J_+1 | — | 0.1394 | 0.2436 | 0.263 | 0.2015 | 0.2544 | 0.2522 | 847_J_+1 |
| 847_E_+1 | — | — | 0.9001 | 0.3793 | 0.7355 | 0.9908 | 0.8391 | 847_E_+1 |
| 847_D_−1 | — | — | — | 0.7272 | 0.6646 | 0.9053 | 0.816 | 847_D_−1 |
| 847_C_+1 | — | — | — | — | 0.3932 | 0.8445 | 0.6336 | 847_C_+1 |
| 847_A_2 | — | — | — | — | — | 0.7457 | 0.6891 | 847_A_2 |
| 847_A_1 | — | — | — | — | — | — | 0.6625 | 847_A_1 |
| CNTL | 4.9% | 4.9% | 12.6% | 16.9% | 17.9% | 6.7% | 1.0% | CNTL |
| CASE | 5.7% | 2.3% | 13.1% | 18.3% | 20.8% | 7.3% | 0.5% | CASE |

| | 874_R_+1 | 874_S_+1 | 874_T_−1 | 874_V_−1 | |
|---|---|---|---|---|---|
| 874_R_+1 | 0.3645 | 0.6882 | 0.7952 | 0.5905 | 874_R_+1 |
| 874_S_+1 | — | 0.5993 | 0.3209 | 0.9142 | 874_S_+1 |
| 874_T_−1 | — | — | 0.7971 | 0.8707 | 874_T_−1 |
| 874_V_−1 | — | — | — | 0.5803 | 874_V_−1 |
| CNTL | 39.9% | 39.5% | 48.6% | 17.6% | CNTL |
| CASE | 35.6% | 41.9% | 50.0% | 19.5% | CASE |

| | 803_K_3 | 803_K_2 | 803_I_1 | 803_1_−1 | 803_H_+1 | 803_E_+2 | |
|---|---|---|---|---|---|---|---|
| 803_K_3 | 0.7046 | 0.104 | 0.7655 | 0.9881 | 0.905 | 0.9005 | 803_K_3 |
| 803_K_2 | — | [chemical structure] | 0.074 | [chemical structure] | 0.1057 | 0.1142 | 803_K_2 |
| 803_I_1 | — | — | 0.7829 | 0.82 | 0.835 | 0.5279 | 803_I_1 |
| 803_I_−1 | — | — | — | 1 | 0.9137 | 0.8473 | 803_I_−1 |
| 803_H_+1 | — | — | — | — | 0.8524 | 0.7543 | 803_H_+1 |
| 803_E_+2 | — | — | — | — | — | 0.806 | 803_E_+2 |
| CNTL | 0.9% | 0.2% | 28.2% | 0.2% | 25.2% | 44.2% | CNTL |
| CASE | 1.2% | 2.1% | 26.9% | 0.0% | 24.4% | 45.3% | CASE |

| | 962_E_3 | 962_E_+2 | 962_G_4 | 962_G_1 | 962_G_2 | 962_G_6 | 962_H_+2 | 962_M_+2 | 962_P_−2 | 962_Q_−1 | 962_S_−1 | 962_U_1 | |
|---|---|---|---|---|---|---|---|---|---|---|---|---|---|
| 962_E_3 | 0.4455 | 0.2588 | 0.4189 | 0.0937 | 0.6231 | 0.7666 | 0.6764 | 0.5219 | 0.8744 | 0.8667 | 0.3369 | 0.8593 | 962_E_3 |
| 962_E_+2 | — | 0.4558 | 0.4429 | 0.2074 | 0.6609 | 0.6666 | 0.774 | 0.4971 | 0.3414 | 0.4857 | 0.3437 | 0.81 | 962_E_+2 |
| 962_G_4 | — | — | 0.1641 | [chemical structure] | 0.3472 | 0.4503 | 0.4306 | 0.1435 | 0.4478 | 0.4527 | 0.0606 | 0.4802 | 962_G_4 |
| 962_G_1 | — | — | — | 0.0541 | 0.3005 | 0.0609 | 0.1946 | 0.1569 | 0.0625 | [chemical structure] | 0.0992 | 0.2891 | 962_G_1 |
| 962_G_2 | — | — | — | | 1 | 0.863 | 0.9481 | 0.6477 | 0.9326 | 0.9491 | 0.3253 | 0.2915 | 962_G_2 |
| 962_G_6 | | — | — | — | | 0.4632 | 0.8269 | 0.3438 | 0.6522 | 0.6812 | 0.19 | 0.0953 | 962_G_6 |
| 962_H_+2 | | — | — | — | | | 0.6236 | 0.2445 | 0.9325 | 0.8592 | [chemical structure] | 0.9522 | 962_H_+2 |
| 962_M_+2 | | — | — | — | — | | | 0.2455 | 0.439 | 0.4377 | 0.4435 | 0.4248 | 962_M_+2 |
| 962_P_−2 | | — | — | | — | | | | 0.7026 | 0.9337 | 0.3309 | 0.8719 | 962_P_+2 |
| 962_Q_−1 | | — | — | | — | | | | | 0.6345 | 0.3378 | 0.9307 | 962_Q_−1 |
| 962_S_−1 | — | — | — | — | — | — | — | | | | 0.1388 | 0.2844 | 962_S_−1 |
| 962_U_1 | — | — | — | — | — | | | | | — | | 0.8173 | 962_U_1 |
| 962_U_2 | | | — | — | — | | | — | — | — | — | | 962_U_2 |
| 962_V_−1 | | | — | — | — | | | | — | | — | | 962_V_−1 |
| 962_V_+2 | — | — | — | — | — | | | — | — | | — | | 962_V_+2 |
| 962_Z_1 | — | | — | — | — | | — | | — | — | — | — | 962_Z_1 |
| CNTL | 35.6% | 12.7% | 13.6% | 27.2% | 7.6% | 20.4% | 41.5% | 12.7% | 23.8% | 23.7% | 11.4% | 3.0% | CNTL |
| CASE | 38.7% | 10.4% | 9.6% | 34.3% | 7.6% | 17.8% | 39.5% | 9.3% | 25.4% | 25.7% | 7.6% | 3.5% | CASE |

| | 962_U_2 | 962_V_−1 | 962_V_−2 | 962_Z_1 | |
|---|---|---|---|---|---|
| 962_E_3 | 0.8966 | 0.0994 | 0.2232 | 0.7448 | 962_E_3 |
| 962_E_+2 | 0.4599 | 0.0563 | 0.3217 | 0.6337 | 962_E_+2 |
| 962_G_4 | 0.4129 | 0.0772 | 0.3147 | 0.2586 | 962_G_4 |
| 962_G_1 | 0.0902 | [chemical structure] | 0.1532 | 0.2534 | 962_G_1 |
| 962_G_2 | 0.7658 | 0.2209 | 0.6273 | 0.9931 | 962_G_2 |
| 962_G_6 | 0.8694 | 0.1544 | 0.3544 | 0.8695 | 962_G_6 |
| 962_H_+2 | 0.6692 | 0.0854 | 0.2691 | 0.7072 | 962_H_+2 |
| 962_M_+2 | 0.3992 | 0.0824 | 0.1662 | 0.6105 | 962_M_+2 |
| 962_P_−2 | 0.8843 | 0.2614 | 0.4837 | 0.4783 | 962_P_+2 |
| 962_Q_−1 | 0.8431 | 0.2369 | 0.5754 | 0.5458 | 962_Q_−1 |
| 962_S_−1 | 0.5332 | 0.0578 | 0.1023 | 0.3447 | 962_S_−1 |
| 962_U_1 | 0.9205 | 0.1002 | 0.3899 | 0.6979 | 962_U_1 |
| 962_U_2 | 0.7763 | 0.112 | 0.6047 | 0.9367 | 962_U_2 |
| 962_V_−1 | | [chemical structure] | 0.17 | 0.2122 | 962_V_−1 |
| 962_V_+2 | — | — | 0.2117 | 0.3953 | 962_V_+2 |
| 962_Z_1 | — | | | 0.797 | 962_Z_1 |
| CNTL | 23.8% | 34.8% | 4.5% | 31.9% | CNTL |
| CASE | 25.0% | 26.5% | 2.5% | 33.1% | CASE |

[0376] TABLE 22
HAPLOTYPE ANALYSIS OF ASTHMA PHENOTYPE UK POPULATION

| | 845_R_1 | 845_R_−1 | 845_P_+1 | 845_K_1 | 845_K_−2 | 845_J_1 | 845_J_−1 | 845_I_−1 | 845_H_+1 | 845_H_−1 | 845_G_1+1 | 845_F_1+1 | 845_D_1 | 845_D_−1 | |
|---|---|---|---|---|---|---|---|---|---|---|---|---|---|---|---|
| 845_{—} | 1 | 0.9397 | 0.9453 | 0.9951 | 0.7734 | 0.976 | 0.8431 | 0.8827 | 0.4507 | 0.7585 | 0.7084 | 0.7086 | 0.1635 | 0.9311 | 845_R_1 |
| R_1 | | | | | | | | | | | | | | | |
| 845_{—} | — | 0.8205 | 0.9313 | 0.9699 | 0.6056 | 0.2624 | 0.8569 | 0.8283 | 0.5498 | 0.1328 | 0.8756 | 0.9152 | 0.17 | 0.9508 | 845_R_−1 |
| R_−1 | | | | | | | | | | | | | | | |
| 845_{—} | — | — | 0.7005 | 0.9103 | 0.7895 | 0.9834 | 0.8405 | 0.8749 | 0.6972 | 0.932 | 0.841 | 0.9488 | 0.3189 | 0.6164 | 845_P_+1 |
| P_+1 | | | | | | | | | | | | | | | |
| 845_{—} | — | — | — | 1 | 0.7384 | 0.9153 | 0.7644 | 0.8366 | 0.6246 | 0.9887 | 0.7308 | 0.9604 | 0.0582 | 0.912 | 845_K_1 |
| K_1 | | | | | | | | | | | | | | | |
| 845_{—} | — | — | — | — | 0.5669 | 0.7827 | 0.7547 | 0.6488 | 0.434 | 0.2897 | 0.7535 | 0.7374 | 0.1262 | 0.7782 | 845_K_−2 |
| K_−2 | | | | | | | | | | | | | | | |
| 845_{—} | — | — | — | — | — | 0.9176 | 0.6353 | 0.8137 | 0.674 | 0.9811 | 0.7349 | 0.9898 | 0.1654 | 0.9809 | 845_J_1 |
| J_1 | | | | | | | | | | | | | | | |
| 845_{—} | — | — | — | — | — | — | 0.6126 | 0.8198 | 0.2988 | 0.6821 | 0.6903 | 0.9269 | 0.1298 | 0.7766 | 845_J_−1 |
| J_−1 | | | | | | | | | | | | | | | |
| 845_{—} | — | — | — | — | — | — | — | 0.7575 | 0.5333 | 0.9108 | 0.2364 | 0.8438 | 0.1247 | 0.769 | 845_I_−1 |
| I_−1 | | | | | | | | | | | | | | | |
| 845_{—} | — | — | — | — | — | — | — | — | 0.4428 | 0.6175 | 0.6713 | 0.8652 | 0.0632 | 0.6706 | 845_H_+1 |
| H_+1 | | | | | | | | | | | | | | | |
| 845_{—} | — | — | — | — | — | — | — | — | — | 0.9207 | 0.9052 | 0.9291 | 0.1835 | 0.7567 | 845_H_−1 |
| H_−1 | | | | | | | | | | | | | | | |
| 845_{—} | — | — | — | — | — | — | — | — | — | — | 0.6688 | 0.4125 | 0.1321 | 0.7828 | 845_G_+1 |
| G_+1 | | | | | | | | | | | | | | | |
| 845_{—} | — | — | — | — | — | — | — | — | — | — | — | 1 | 0.1697 | 0.9427 | 845_F_+1 |
| F_+1 | | | | | | | | | | | | | | | |
| 845_{—} | — | — | — | — | — | — | — | — | — | — | — | — | 0.1275 | 0.2245 | 845_D_1 |
| D_−1 | | | | | | | | | | | | | | | |
| 845_{—} | — | | — | — | — | — | — | — | — | — | — | — | — | 0.7377 | 845_D_−1 |
| D_−1 | | | | | | | | | | | | | | | |
| CNTL | 13.6% | 26.6% | 6.4% | 0.4% | 27.0% | 36.6% | 37.5% | 12.6% | 19.3% | 43.6% | 13.2% | 18.8% | 0.0% | 9.3% | CNTL |
| CASE | 13.9% | 25.3% 7.3% | 0.0% | 24.0% | 37.5% | 40.1% | 11.1% | 16.1% | 42.6% | 14.8% | 18.3% | 1.3% | 10.3% | CASE | |

| | 847_K_1 | 847_J_+1 | 847_E_+1 | 847_D_−1 | 847_C_+1 | 847_A_2 | 847_A_1 | |
|---|---|---|---|---|---|---|---|---|
| 847_K_1 | 0.6053 | 0.8162 | 0.4353 | 0.4016 | 0.327 | 0.3663 | 0.678 | 847_K_1 |
| 847_J_+1 | — | 1 | 0.858 | 0.4861 | 0.4485 | 0.8585 | 0.6844 | 847_J_+1 |
| 847_E_+1 | — | — | 0.7727 | 0.1972 | 0.434 | 0.8528 | 0.729 | 847_E_+1 |
| 847_D_−1 | — | — | — | 0.2351 | 0.2354 | 0.6545 | 0.5647 | 847_D_−1 |
| 847_C_+1 | — | — | — | — | 0.2175 | 0.5544 | 0.5157 | 847_C_+1 |
| 847_A_2 | — | — | — | — | — | 0.54 | 0.5849 | 847_A_2 |
| 847_A_1 | — | — | — | — | — | — | 0.6479 | 847_A_1 |
| CNTL | 3.6% | 2.9% | 12.8% | 16.5% | 17.8% | 5.4% | 1.3% | CNTL |
| CASE | 4.8% | 2.3% | 14.1% | 21.2% | 22.9% | 7.1% | 0.6% | CASE |

| | 874_R_+1 | 874_S_+1 | 874_T_−1 | 874_V_−1 | |
|---|---|---|---|---|---|
| 874_R_+1 | 0.2918 | 0.5308 | 0.7188 | 0.5775 | 874_R_+1 |
| 874_S_+1 | — | 0.4122 | 0.1976 | 0.5377 | 874_S_+1 |
| 874_T_−1 | — | — | 0.7645 | 0.6776 | 874_T_−1 |
| 874_V_−1 | — | — | — | 0.5164 | 874_V_−1 |
| CNTL | 41.5% | 38.0% | 48.9% | 16.9% | CNTL |
| CASE | 35.8% | 42.3% | 50.6% | 19.6% | CASE |

| | 803_K_3 | 803_K_2 | 803_I_1 | 803_I_−1 | 803_H_+1 | 803_E_+2 | |
|---|---|---|---|---|---|---|---|
| 803_K_3 | 0.6955 | 0.3719 | 0.5379 | 0.9555 | 0.9532 | 0.7228 | 803_K_3 |
| 803_K_2 | — | 0.3124 | 0.3076 | 0.3062 | 0.5566 | 0.4253 | 803_K_2 |
| 803_I_1 | — | — | 0.3827 | 0.5052 | 0.5243 | 0.597 | 803_I_1 |
| 803_I_−1 | — | — | — | 1 | 0.9649 | 0.4211 | 803_I_−1 |
| 803_H_+1 | — | — | — | — | 1 | 0.5717 | 803_H_+1 |
| 803_E_+2 | — | — | — | — | — | 0.3903 | 803_E_+2 |
| CNTL | 1.1% | 0.4% | 28.6% | 0.4% | 25.7% | 42.4% | CNTL |
| CASE | 1.5% | 1.5% | 24.7% | 0.0% | 25.3% | 46.9% | CASE |

| | 962_E_3 | 962_E_+2 | 962_G_4 | 962_G_1 | 962_G_2 | 962_G_6 | 962_H_+2 | 962_M_+2 | 962_P_=2 | 962_Q_−1 | 962_S_−1 | 962_U_1 | 962_U_2 | |
|---|---|---|---|---|---|---|---|---|---|---|---|---|---|---|
| 962_E_3 | 1 | 0.6202 | 0.6817 | 0.1354 | 0.931 | 0.6669 | 0.8392 | 0.4729 | 0.8903 | 0.9042 | 0.3877 | 0.6387 | 0.82 | 962_E_3 |
| 962_E_+2 | | 0.4621 | 0.409 | 0.1993 | 0.4089 | 0.1655 | 0.5307 | 0.3457 | 0.323 | 0.423 | 0.322 | 0.7633 | 0.3004 | 962_E_+2 |
| 962_G_4 | — | | 0.3105 | 0.0711 | 0.5288 | 0.2277 | 0.5171 | 0.2912 | 0.4569 | 0.5166 | 0.1901 | 0.6237 | 0.3428 | 962_G_4 |
| 962_G_1 | — | | — | 0.0502 | 0.2925 | [chemical structure] | 0.175 | 0.1113 | 0.1215 | 0.1506 | 0.1123 | 0.1071 | 0.1606 | 962_G_1 |
| 962_G_2 | | — | — | — | 0.7106 | 0.5809 | 0.7814 | 0.4259 | 0.8995 | 0.9066 | 0.2037 | 0.3868 | 0.5857 | 962_G_2 |
| 962_G_6 | — | | — | — | — | 0.2261 | 0.4569 | 0.1416 | 0.1459 | 0.1754 | [chemical structure] | 0.0718 | 0.507 | 962_G_6 |
| 962_H_+2 | — | | — | — | — | — | 0.3926 | 0.301 | 0.7112 | 0.7315 | 0.1376 | 0.7039 | 0.5272 | 962_H_+2 |
| 962_M_+2 | | | — | — | — | — | | 0.1221 | 0.2005 | 0.2046 | 0.309 | 0.2791 | 0.1253 | 962_M_+2 |
| 962_P_−2 | | | | — | — | | — | | 0.5757 | 0.7311 | 0.21 | 0.9297 | 0.891 | 962_P_−2 |
| 962_Q_−1 | | | | — | — | | — | | | 0.5776 | 0.2338 | 0.882 | 0.8633 | 962_Q_−1 |
| 962_S_−1 | — | | — | | — | | | | — | | 0.1006 | 0.2301 | 0.2779 | 962_S_−1 |
| 962_U_1 | | | — | — | — | | | | — | | | 1 | 0.7188 | 962_U_1 |
| 962_U_2 | | | — | — | | — | — | | — | — | — | | 0.3727 | 962_U_2 |
| 962_V_−1 | — | | — | — | | | | — | — | | — | — | | 962_V_−1 |
| 962_V_+2 | — | — | — | — | | | | | — | | — | — | | 962_V_+2 |
| 962_Z_1 | | — | — | — | | | — | | — | x | — | — | | 962_Z_1 |
| CNTL | 36.8% | 12.5% | 14.0% | 25.2% | 6.4% | 21.7% | 43.6% | 12.4% | 24.6% | 24.8% | 10.9% | 3.7% | 25.0% | CNTL |
| CASE | 36.4% | 9.9% | 10.6% | 33.5% | 7.4% | 16.8% | 39.5% | 7.8% | 22.0% | 22.3% | 6.3% | 3.7% | 21.3% | CASE |

| | 962_V_−1 | 962_V_+2 | 962_Z_1 | |
|---|---|---|---|---|
| 962_E_3 | 0.3109 | 0.5899 | 0.5887 | 962_E_3 |
| 962_E_+2 | [chemical structure] | 0.4364 | 0.5318 | 962_E_+2 |
| 962_G_4 | 0.262 | 0.2455 | 0.2256 | 962_G_4 |
| 962_G_1 | 0.0671 | 0.2155 | 0.1322 | 962_G_1 |
| 962_G_2 | 0.4558 | 0.6792 | 0.7051 | 962_G_2 |
| 962_G_6 | 0.0978 | 0.2839 | 0.3739 | 962_G_6 |
| 962_H_+2 | 0.3122 | 0.2422 | 0.5073 | 962_H_+2 |
| 962_M_+2 | 0.1441 | 0.1237 | 0.1854 | 962_M_+2 |
| 962_P_−2 | 0.1815 | 0.515 | 0.5684 | 962_P_−2 |
| 962_Q_−1 | 0.2645 | 0.724 | 0.5896 | 962_Q_−1 |
| 962_S_−1 | 0.1283 | 0.0951 | 0.0898 | 962_S_−1 |
| 962_U_1 | 0.2327 | 0.6153 | 0.5005 | 962_U_1 |
| 962_U_2 | 0.1 | 0.6232 | 0.734 | 962_U_2 |
| 962_V_−1 | 0.1154 | 0.2506 | 0.5107 | 962_V_−1 |
| 962_V_+2 | | 0.4526 | 0.3607 | 962_V_+2 |
| 962_Z_1 | — | 0.2713 | 962_Z_1 | |
| CNTL | 34.4% | 4.5% | 30.0% | CNTL |
| CASE | 27.2% | 2.6% | 35.1% | CASE |

[0377] TABLE 23
HAPLOTYPE ANALYSIS OF ASTHMA PHENOTYPE US POPULATION

| | 845_R_1 | 845_R_−1 | 845_P_+1 | 845_K_1 | 845_K_−2 | 845_J_1 | 845_J_−1 | 845_I_−1 | 845_H_+1 | 845_H_−1 | 845_G_+1 | 845_F_+1 | 845_D_1 | 845_D_−1 | |
|---|---|---|---|---|---|---|---|---|---|---|---|---|---|---|---|
| 845_{—} | 0.1433 | 0.0751 | 0.0677 | 0.0985 | [chemical structure] | 0.1403 | 0.2377 | 0.2748 | 0.3446 | 0.1361 | 0.3212 | 0.3334 | 0.236 | 0.289 | 845_R_1 |
| R_1 | | | | | | | | | | | | | | | |
| 845_{—} | | 0.718 | 0.1286 | 0.6516 | 0.3598 | 0.3854 | 0.5459 | 0.9798 | 0.1447 | 0.7334 | 0.9033 | 0.9244 | 0.6754 | 0.7863 | 845_R_−1 |
| R_−1 | | | | | | | | | | | | | | | |
| 845_{—} | | — | [chemical structure] | [chemical structure] | 0.0855 | 0.1031 | 0.1415 | 0.0766 | 0.0661 | 0.1272 | [chemical structure] | 0.1122 | 0.0741 | 0.1412 | 845_P_+1 |
| P_+1 | | | | | | | | | | | | | | | |
| 845_{—} | — | — | — | 1 | 0.2461 | 0.1405 | 0.6341 | 0.9495 | 0.1157 | 0.8569 | 0.6691 | 0.7337 | 0.8977 | 0.5857 | 845_K_1 |
| K_−1 | | | | | | | | | | | | | | | |
| 845_{—} | — | — | — | — | 0.3465 | 0.2259 | 0.3114 | 0.574 | 0.0596 | 0.3323 | 0.5334 | 0.4471 | 0.406 | 0.524 | 845_K_−2 |
| K_−2 | | | | | | | | | | | | | | | |
| 845_{—} | — | — | — | — | — | 0.1542 | 0.2328 | 0.2346 | 0.1707 | 0.2033 | 0.2717 | 0.3959 | 0.282 | 0.2671 | 845_J_1 |
| J_1 | | | | | | | | | | | | | | | |
| 845_{—} | — | — | — | — | — | — | 0.7267 | 0.8971 | 0.2452 | 0.5322 | 0.7891 | 0.9281 | 0.7726 | 0.7919 | 845_J_−1 |
| J_−1 | | | | | | | | | | | | | | | |
| 845_{—} | — | — | — | — | — | — | — | 1 | 0.4022 | 0.9652 | 0.9853 | 0.6398 | 0.9932 | 0.6283 | 845_I_−1 |
| 1_−1 | | | | | | | | | | | | | | | |
| 845_{—} | — | — | — | — | — | — | — | — | 0.1915 | 0.2811 | 0.3217 | 0.5231 | 0.3226 | 0.3268 | 845_H_+1 |
| H_+1 | | | | | | | | | | | | | | | |
| 845_{—} | — | — | — | — | — | — | — | — | — | 0.8652 | 0.9207 | 0.933 | 0.9655 | 0.7683 | 845_H_−1 |
| H_−1 | | | | | | | | | | | | | | | |
| 845_{—} | — | — | — | — | — | — | — | — | — | — | 0.8037 | 0.9146 | 0.7918 | 0.4422 | 845_G_+1 |
| G_+1 | | | | | | | | | | | | | | | |
| 845_{—} | — | — | — | — | — | — | — | — | — | — | — | 0.8253 | 0.836 | 0.698 | 845_F_+1 |
| F_+1 | | | | | | | | | | | | | | | |
| 845_{—} | — | — | — | — | — | — | — | — | — | — | — | — | 1 | 0.6294 | 845_D_1 |
| D_1 | | | | | | | | | | | | | | | |
| 845_{—} | — | | — | — | — | — | — | — | — | — | — | — | — | 0.5906 | 845_D_−1 |
| D_−1 | | | | | | | | | | | | | | | |
| CNTL | 17.1% | 32.5% | 6.5% | 0.0% | 32.5% | 30.9% | 36.4% | 13.3% | 20.1% | 48.1% | 13.2% | 17.5% | 0.7% | 11.0% | CNTL |
| CASE | 7.1% | 28.3% | 17.4% | 0.0% | 23.8% | 43.5% | 32.6% | 13.0% | 10.9% | 50.0% | 10.9% | 15.2% | 0.0% | 14.3% | CASE |

| | 847_K_1 | 847_J_+1 | 847_E_+1 | 847_D_−1 | 847_C_+1 | 847_A_2 | 847_A_1 | |
|---|---|---|---|---|---|---|---|---|
| 847_K_1 | 0.7617 | 0.3082 | 0.8693 | 0.2469 | 0.7319 | 0.9941 | 0.9725 | 847_K_1 |
| 847_J_+1 | — | 0.1949 | 0.1683 | 0.0636 | 0.1634 | 0.0917 | 0.1948 | 847_J_+1 |
| 847_E_+1 | — | — | 0.7899 | 0.6313 | 0.6794 | 0.8897 | 0.6777 | 847_E_+1 |
| 847_D_+1 | — | — | — | 0.1431 | 0.4248 | 0.2657 | 0.1912 | 847_D_−1 |
| 847_C_+1 | — | — | — | — | 0.5067 | 0.8066 | 0.5641 | 847_C_+1 |
| 847_A_2 | — | — | — | — | — | 1 | 0.9553 | 847_A_2 |
| 847_A_1 | — | — | — | — | — | — | 1 | 847_A_1 |
| CNTL | 7.3% | 8.4% | 12.3% | 17.6% | 18.2% | 9.1% | 0.7% | CNTL |
| CASE | 8.3% | 2.1% | 9.1% | 7.5% | 13.0% | 8.3% | 0.0% | CASE |

| | 874_R_+1 | 874_S_+1 | 874_T_−1 | 874_V_−1 | |
|---|---|---|---|---|---|
| 874_R_+1 | 0.8552 | 0.8248 | 0.9906 | 0.9913 | 874_R_+1 |
| 874_S_+1 | — | 0.862 | 0.9128 | 0.9877 | 874_S_+1 |
| 874_T_−1 | — | — | 1 | 0.9906 | 874_T_−1 |
| 874_V_−1 | — | — | — | 1 | 874_V_−1 |
| CNTL | 37.0% | 42.2% | 48.1% | 18.8% | CNTL |
| CASE | 35.0% | 40.5% | 47.6% | 19.1% | CASE |

| | 803_K_3 | 803_K_2 | 803_I_1 | 803_I_−1 | 803_H_+1 | 803_E_+2 | |
|---|---|---|---|---|---|---|---|
| 803_K_3 | 1 | [chemical structure] | 0.3618 | 0.8151 | 0.6769 | 0.5253 | 803_K_3 |
| 803_K_2 | — | [chemical structure] | [chemical structure] | [chemical structure] | 0.0581 | [chemical structure] | 803_K_2 |
| 803_I_1 | — | — | 0.2666 | 0.3065 | 0.5303 | 0.4402 | 803_I_1 |
| 803_I_−1 | — | — | — | 1 | 0.6784 | 0.3286 | 803_I_−1 |
| 803_H_+1 | — | — | — | — | 0.6895 | 0.4468 | 803_H_+1 |
| 803_E_+2 | — | — | — | — | — | 0.3902 | 803_E_+2 |
| CNTL | 0.6% | 0.0% | 27.6% | 0.0% | 24.4% | 47.4% | CNTL |
| CASE | 0.0% | 4.5% | 36.4% | 0.0% | 20.5% | 38.6% | CASE |

| | 962_E_3 | 962_E_+2 | 962_G_4 | 962_G_1 | 962_G_2 | 962_G_6 | 962_H_+2 | 296_M_+2 | 296_P_−2 | 962_Q_−1 | 962_S_−1 | 962_U_1 | |
|---|---|---|---|---|---|---|---|---|---|---|---|---|---|
| 962_E_3 | 0.0842 | 0.116 | 0.0783 | 0.0837 | 0.2803 | 0.3026 | 0.2041 | 0.3918 | 0.0681 | 0.0605 | 0.3617 | 0.1492 | 962_E_3 |
| 962_E_+2 | | 1 | 0.5883 | 0.8796 | 0.9873 | 0.6633 | 0.9931 | 0.9613 | 0.1674 | 0.1752 | 0.9814 | 0.9603 | 962_E_+2 |
| 962_G_4 | | | 0.291 | 0.1488 | 0.5145 | 0.5225 | 0.6364 | 0.2885 | [chemical structure] | [chemical structure] | 0.2983 | 0.4429 | 962_G_4 |
| 962_G_1 | | | | 0.3839 | 0.8397 | 0.7321 | 0.4268 | 0.7269 | 0.0502 | [chemical structure] | 0.587 | 0.5489 | 962_G_1 |
| 962_G_2 | | | | | 1 | 0.9314 | 0.9849 | 0.954 | 0.0577 [chemical structure] | 0.9935 | 0.8216 | 962_G_2 | |
| 962_G_6 | | | | | | 0.5195 | 0.946 | 0.9703 | 0.1488 | 0.1326 | 0.8997 | 0.8463 | 962_G_6 |
| 962_H_+2 | | | | | | | 0.8654 | 0.6608 | 0.2227 | 0.1321 | 0.4193 | 0.8572 | 962_H_+2 |
| 962_M_+2 | | | — | | | — | | 0.8065 | 0.0529 | 0.059 | 0.1433 | 0.8703 | 962_M_+2 |
| 962_P_+2 | | — | | — | | — | — | — | [chemical structure] | 0.0864 | 0.0605 | 0.1057 | 962_P_−2 |
| 962_Q_−1 | — | — | — | — | | — | — | — | — | [chemical structure] | 0.0651 | 0.0846 | 962_Q_−1 |
| 962_S_−1 | | — | | | — | — | — | — | — | | 1 | 0.9244 | 962_S_−1 |
| 962_U_1 | | | | | | — | — | — | — | — | | 1 | 962_U_1 |
| 962_U_2 | | — | | | | — | — | — | — | — | | | 962_V_2 |
| 962_V_−1 | | | — | | | — | — | — | — | — | | — | 962_V_−1 |
| 962_V_+2 | | | | | — | — | — | — | — | — | | | 962_V_+2 |
| 962_Z_1 | | — | | | — | — | — | — | — | — | | | 962_Z_1 |
| CNTL | 33.6% | 13.0% | 129% | 30.8% | 9.7% | 17.7% | 37.7% | 13.2% | 22.4% | 21.7% | 12.2% | 1.9% | CNTL |
| CASE | 47.8% | 12.5% | 6.3% | 37.5% | 8.3% | 21.7% | 39.6% | 15.2% | 40.5% | 39.1% | 12.5% | 2.4% | CASE |

| | 962_U_2 | 962_V_−1 | 962_V_+2 | 296_Z_1 | |
|---|---|---|---|---|---|
| 962_E_3 | [chemical structure] | 0.2377 | 0.2088 | 0.1554 | 962_E_3 |
| 962_E_+2 | 0.1617 | 0.6046 | 0.8233 | 0.5705 | 962_E_+2 |
| 962_G_4 | [chemical structure] | 0.2715 | [chemical structure] | 0.2321 | 962_G_4 |
| 962_G_1 | [chemical structure] | 0.3085 | 0.3786 | 0.2794 | 962_G_1 |
| 962_G_2 | [chemical structure] | 0.2836 | 0.432 | 0.4668 | 962_G_2 |
| 962_G_6 | 0.1362 | 0.3672 | 0.599 | 0.6065 | 962_G_6 |
| 962_H_+2 | 0.1034 | 0.2646 | 0.7828 | 0.5467 | 962_H_+2 |
| 962_M_+2 | 0.056 | 0.5608 | 0.7893 | 0.5495 | 962_M_+2 |
| 962_P_+2 | 0.0849 | 0.1147 | [chemical structure] | 0.0938 | 962_P_−2 |
| 962_Q_−1 | [chemical structure] | 0.0563 | [chemical structure] | 0.0875 | 962_Q_−1 |
| 962_S_−1 | 0.0551 | 0.5854 | 0.8282 | 0.7192 | 962_S_−1 |
| 962_U_1 | 0.064 | 0.5148 | 0.6903 | 0.5005 | 962_U_1 |
| 962_U_2 | [chemical structure] | [chemical structure] | [chemical structure] | 0.0587 | 962_V_2 |
| 962_V_−1 | | 0.1995 | 0.0821 | 0.076 | 962_V_−1 |
| 962_V_+2 | — | | 0.6823 | 0.2958 | 962_V_+2 |
| 962_Z_1 | | | | 0.2185 | 962_Z_1 |
| CNTL | 21.7% | 35.4% | 4.7% | 35.5% | CNTL |
| CASE | 39.6% | 23.9% | 2.1% | 25.0% | CASE |

[0378] All SNP combinations in Tables 21, 22, and 23 that demonstrated a significant difference (p≦0.05) in the distribution of frequencies of the four haplotypes between the cases and the control populations were further analyzed to identify individual haplotypes that were also significant. Table 24 presents the haplotypes that were significantly associated, at the 0.05 level of significance, with the asthma phenotype. Haplotypes with higher allele frequency in the case population than in the control population acted as risk factors that increased the susceptibility to asthma. Haplotypes with lower allele frequencies in the case population than in the control population acted as protective factors that decreased the susceptibility to asthma. For Gene 962, three haplotypes involving allele A at SNP G1 were susceptibility haplotypes, associated with an increased risk of asthma at the 0.05 level of significance in the combined population. They were haplotypes A/A (SNPs G1/Q−1, p=0.0084), A/C (SNPs G1/V−1, p=0.0142) and G/A (SNPs G4/G1, p=0.045). Haplotype A/C was a protective haplotype (SNPs H+2/S−1, p=0.0097). In the UK population, three haplotypes were protective. They were haplotypes C/T (SNPs E+2/V−1, p=0.0149), G/T (SNPs G1/G6, p=0.0164) and C/C (SNPs G6/S−1, p=0.0308). In the US population, six haplotypes were susceptibility haplotypes. They were G/A (SNPs G4/Q-1, p=0.0466), G/T (SNPs G4/U2, p=0.0363), A/A (SNPs G4/V+2, p=0.0428), A/A (SNPs G1/Q−1, p=0.0024), A/T (SNPs G1/U2, p=0.0027) and T/G (SNPs U2/V+2, p=0.0216). For Gene 845, haplotype G/G (SNPs R1/K−2, p=0.01 16) was a susceptibility haplotype in the US population and haplotype A/G (SNPs R1/K−2, p=0.0367) was protective in the US population. For Gene 803, three haplotypes involving allele A at SNP K2 were susceptibility haplotypes in the US population. They were haplotypes C/A (SNPs K3/K2, p=0.0451), A/C (SNPs K2/I1, p=0.0453) and A/A (SNPs K2/E+2, p=0.0442).

TABLE 24

| | | | | | |
|---|---|---|---|---|---|
| | SNP | | | | |
| | COMBI- | HAPLO- | FREQUENCIES | | P- |
| GENE | NATION | TYPE | CNTL | CASE | VALUE |

Asthma Yes/No
Combined US and UK

| | | | | | |
|---|---|---|---|---|---|
| 962 | G4/G1 | GA | 0.208523 | 0.278141 | 0.045 |
| 962 | G1/Q−1 | AA | 0.049187 | 0.12121 | 0.0084 |
| 962 | G1/V−1 | AC | 0.157636 | 0.256126 | 0.0142 |
| 962 | H+2/S−1 | AC | 0.05552 | 0.000001 | 0.0097 |

Asthma Yes/No
UK Population

| | | | | | |
|---|---|---|---|---|---|
| 962 | E+2/V−1 | CT | 0.054678 | 0 | 0.0149 |
| 962 | G1/G6 | GT | 0.198435 | 0.099309 | 0.0164 |
| 962 | G6/S−1 | CC | 0.101659 | 0.040006 | 0.0308 |

Asthma Yes/No
US Population

| | | | | | |
|---|---|---|---|---|---|
| 845 | R1/K−2 | GG | 0.504855 | 0.731782 | 0.0116 |
| 845 | R1/K−2 | AG | 0.17047 | 0.032411 | 0.0367 |
| 803 | K3/K2 | CA | 0 | 0.045455 | 0.0451 |
| 803 | K2/I−1 | AG | 0 | 0.045455 | 0.0478 |
| 803 | K2/E+2 | AA | 0 | 0.045455 | 0.0442 |
| 962 | G4/Q−1 | GA | 0.192645 | 0.327035 | 0.0466 |
| 962 | G4/U2 | GT | 0.191643 | 0.333333 | 0.0363 |
| 962 | G4/V+2 | AA | 0 | 0.020833 | 0.0428 |
| 962 | G1/Q−1 | AA | 0.042798 | 0.25136 | 0.0024 |
| 962 | G1/U2 | AT | 0.039558 | 0.248019 | 0.0027 |
| 962 | U2/V+2 | TG | 0.217236 | 0.375 | 0.0216 |

[0379] b. Bronchial Hyper-Responsiveness:

[0380] In Tables 25, 26 and 27, the haplotype analysis (2-at-a-time) is presented for the combined, the UK and the US populations, respectively. Ten SNP combinations in Gene 845 are significant in the combined, the UK and the US population alone: SNPs R 1 & K−2 (combined p=0.0385), SNPs R−1 & J 1 (UK p=0.013), SNPs P+1 & H+1 (US p=0.0267), SNPs K 1 & H+1 (US p=0.0076), SNPs K 1 & D−1 (combined p=0.0134), SNPs K−2 & H+1 (combined p=0.0355), SNPs K−2 & D 1 (UK p=0.0428), SNPs J 1 & D 1 (UK p=0.0097), SNPs H−1 & D 1 (UK p=0.0422) and SNPs D 1 & D−1 (UK p=0.007). Nine SNP combinations in Gene 847 are significant in the US population: SNPs K 1 & D−1 (p=0.0118), SNPs K 1 & C+1 (p=0.0225), SNPs J+1 & E+1 (p=0.038), SNPs J+1 & D−1 (p=0.0081), SNPs J+1 & C+1 (p=0.0077), SNPs E+1 & C+1 (p=0.0296), SNPs D−1 & A 2 (p=0.0343), SNPs D−1 & A 1 (p=0.0483) and SNPs C+1 & A 2 (p=0.0328). Two SNP combinations in Gene 803 are significant in the US population: SNPs K 2 & I 1 (p=0.0212), and SNPs K 2 & E+2 (p=0.0281). Two SNP combinations in Gene 962 are significant in the UK and the US population alone: SNPs G 2 & S−1 (UK p=0.0491) and SNPs E 3 & E+2 (US p=0.0431).

TABLE 25
HAPLOTYPE ANALYSIS OF BHR PHENOTYPE COMBINED US/UK POPULATION

| | 845_R_1 | 845_R_−1 | 845_P_+1 | 845_K_1 | 845_K_2 | 845_J_1 | 845_J_−1 | 845_I_−1 | 845_H_+1 | 845_H_−1 | 845_G_+1 | 845_F_+1 | 845_D_1 | 845_D_−1 | |
|---|---|---|---|---|---|---|---|---|---|---|---|---|---|---|---|
| 845_{—} | 0.1227 | 0.093 | 0.1055 | 0.254 | [chemical structure] | [chemical structure] | 0.3268 | 0.2586 | 0.4918 | 0.0834 | 0.4205 | 0.418 | 0.0775 | [chemical structure] | 845_R_1 |
| R_1 | | | | | | | | | | | | | | | |
| 845_{—} | — | 0.4252 | 0.1888 | 0.4799 | 0.1658 | [chemical structure] | 0.1544 | 0.7499 | 0.0753 | 0.1256 | 0.729 | 0.7624 | 0.2879 | [chemical structure] | 845_R_−1 |
| R_−1 | | | | | | | | | | | | | | | |
| 845_{—} | — | — | 0.0715 | 0.1912 | 0.1045 | 0.0511 | 0.3078 | 0.2192 | 0.1092 | 0.184 | 0.18 | 0.2121 | 0.1304 | 0.0807 | 845_P_+1 |
| P_+1 | | | | | | | | | | | | | | | |
| 845_{—} | | — | — | 1 | 0.2677 | [chemical structure] | 0.4404 | 0.9403 | 0.2549 | 0.3269 | 0.7194 | 0.9307 | 0.2135 | [chemical structure] | 845_K_1 |
| K_1 | | | | | | | | | | | | | | | |
| 845_{—} | — | — | — | — | 0.1469 | [chemical structure] | 0.0665 | 0.2862 | [chemical structure] | 0.2709 | 0.3012 | 0.2844 | 0.1286 | [chemical structure] | 845_K_−2 |
| K_−2 | | | | | | | | | | | | | | | |
| 845_{—} | — | — | — | — | — | [chemical structure] | [chemical structure] | [chemical structure] | [chemical structure] | [chemical structure] | [chemical structure] | [chemical structure] | [chemical structure] | [chemical structure] | 845_J_1 |
| J_1 | | | | | | | | | | | | | | | |
| 845_{—} | — | — | — | — | — | — | 0.3952 | 0.5902 | 0.2621 | 0.3141 | 0.8472 | 0.8055 | 0.197 | [chemical structure] | 845_J_−1 |
| J_−1 | | | | | | | | | | | | | | | |
| 845_{—} | — | — | — | — | — | — | — | 1 | 0.2429 | 0.37 | 0.6965 | 0.7552 | 0.584 | [chemical structure] | 845_I_−1 |
| I_−1 | | | | | | | | | | | | | | | |
| 845_{—} | — | — | — | — | — | — | — | — | 0.1325 | 0.0718 | 0.2968 | 0.4653 | 0.0749 | [chemical structure] | 845_H_+1 |
| H_+1 | | | | | | | | | | | | | | | |
| 845_{—} | — | — | — | — | — | — | — | — | — | 0.1969 | 0.424 | 0.3396 | 0.192 | 0.0636 | 845_H_−1 |
| H_−1 | | | | | | | | | | | | | | | |
| 845_{—} | — | — | — | — | — | — | — | — | — | — | 0.7318 | 0.6831 | 0.4852 | [chemical structure] | 845_G_+1 |
| G_+1 | | | | | | | | | | | | | | | |
| 845_{—} | — | — | — | — | — | — | — | — | — | — | — | 1 | 0.5881 | [chemical structure] | 845_F_+1 |
| F_+1 | | | | | | | | | | | | | | | |
| CNTL | 14.8% | 28.7% | 6.5% | 0.2% | 28.9% | 34.5% | 37.1% | 12.8% | 19.6% | 45.2% | 13.2% | 18.4% | 0.2% | 9.9% | CNTL |
| CASE | 8.3% | 23.8% | 12.5% | 0.0% | 20.9% | 50.0% | 31.8% | 12.5% | 12.5% | 37.5% | 14.8% | 18.2% | 1.2% | 20.2% | CASE |

| | 847_K_1 | 847_J_+1 | 847_E_+1 | 847_D_−1 | 847_C_+1 | 847_A_2 | 847_A_1 | |
|---|---|---|---|---|---|---|---|---|
| 847_K_1 | 0.781 | 0.1716 | 0.8466 | 0.7351 | 0.93 | 0.6906 | 0.8334 | 847_K_1 |
| 847_J_+1 | — | 0.1502 | 0.1639 | 0.1579 | 0.2008 | 0.1666 | 0.1498 | 847_J_+1 |
| 847_E_+1 | — | — | 1 | 0.8405 | 0.964 | 0.3695 | 0.9439 | 847_E_+1 |
| 847_D_−1 | — | — | — | 0.7526 | 0.7406 | 0.617 | 0.9136 | 847_D_−1 |
| 847_C_+1 | — | — | — | — | 1 | 0.6384 | 0.9961 | 847_C_+1 |
| 847_A_2 | — | — | — | — | — | 0.4852 | 0.7284 | 847_A_2 |
| 847_A_1 | — | — | — | — | — | — | 1 | 847_A_1 |
| CNTL | 4.9% | 4.9% | 12.6% | 16.9% | 17.9% | 6.7% | 1.0% | CNTL |
| CASE | 3.6% | 1.1% | 12.0% | 15.1% | 17.7% | 4.2% | 1.0% | CASE |

| | 874_R_+1 | 874_S_+1 | 874_T_−1 | 874_V_−1 | |
|---|---|---|---|---|---|
| 874_R_+1 | 0.0738 | 0.1638 | 0.2993 | 0.2605 | 874_R_+1 |
| 874_S_+1 | — | 0.6422 | 0.3442 | 0.7898 | 874_S_+1 |
| 874_T_−1 | — | — | 0.8214 | 0.92 | 874_T_−1 |
| 874_V_−1 | — | — | — | 0.7695 | 874_V_−1 |
| CNTL | 39.9% | 39.5% | 48.6% | 17.6% | CNTL |
| CASE | 29.3% | 42.6% | 46.9% | 18.8% | CASE |

| | 803_K_3 | 803_K_2 | 803_I_1 | 803_I_−1 | 803_H_+1 | 803_E_+2 | |
|---|---|---|---|---|---|---|---|
| 803_K_3 | 0.1647 | 0.3798 | 0.4488 | 0.4937 | 0.3962 | 0.5099 | 803_K_3 |
| 803_K_2 | — | 0.3776 | 0.9758 | 0.9847 | 0.5573 | 0.8898 | 803_K_2 |
| 803_I_1 | — | — | 1 | 0.9954 | 0.7551 | 0.6129 | 803_I_1 |
| 803_I_−1 | — | — | — | 1 | 0.5881 | 0.7119 | 803_I_−1 |
| 803_H_+1 | — | — | — | — | 0.5414 | 0.8006 | 803_H_+1 |
| 803_E_+2 | — | — | — | — | — | 0.6722 | 803_E_+2 |
| CNTL | 0.9% | 0.2% | 28.2% | 0.2% | 25.2% | 44.2% | CNTL |
| CASE | 2.6% | 0.9% | 28.4% | 0.0% | 21.9% | 46.5% | CASE |

| | 962_E_3 | 962_E_+2 | 962_G_4 | 962_G_1 | 962_G_2 | 962_G_6 | 962_H_+2 | 962_M_+2 | 962_P_−2 | 962_Q_−1 | 962_S_−1 | 962_U_1 | |
|---|---|---|---|---|---|---|---|---|---|---|---|---|---|
| 962_E_3 | 0.9071 | 0.4317 | 0.516 | 0.4162 | 0.9572 | 0.7189 | 0.4794 | 0.6478 | 0.7666 | 0.8326 | 0.774 | 0.874 | 962_E_3 |
| 962_E_+2 | | 0.3128 | 0.3279 | 0.6247 | 0.2338 | 0.4261 | 0.4258 | 0.3215 | 0.2481 | 0.3352 | 0.2178 | 0.4443 | 962_E_+2 |
| 962_G_4 | — | | 0.1756 | 0.2176 | 0.365 | 0.3236 | 0.2693 | 0.1477 | 0.3337 | 0.3724 | 0.1964 | 0.3196 | 962_G_4 |
| 962_G_1 | — | | | 0.626 | 0.7488 | 0.6561 | 0.6164 | 0.5051 | 0.6091 | 0.4918 | 0.6264 | 0.7516 | 962_G_1 |
| 962_G_2 | | | | | 0.683 | 0.154 | 0.7557 | 0.3427 | 0.7201 | 0.7211 | 0.1784 | 0.5279 | 962_G_2 |
| 962_G_6 | — | | | | | 0.3165 | 0.2217 | 0.2693 | 0.0824 | 0.0752 | 0.2377 | 0.1175 | 962_G_6 |
| 962_H_+2 | — | — | — | | — | | 0.2641 | 0.0762 | 0.622 | 0.6895 | 0.1513 | 0.6198 | 962_H_+2 |
| 962_M_+2 | | | | | — | — | | 0.2968 | 0.3632 | 0.3917 | 0.6844 | 0.3581 | 962_M_+2 |
| 962_P_−2 | | | | | — | — | | | 0.6921 | 0.9484 | 0.5977 | 0.789 | 962_P_−2 |
| 962_Q_−1 | — | | | | — | — | — | — | — | 0.7901 | 0.6265 | 0.7198 | 962_Q_−1 |
| 962_S_−1 | — | — | | | — | — | — | — | — | | 0.3741 | 0.4508 | 962_S_−1 |
| 962_U_1 | — | | | | — | — | — | — | | — | | 0.3617 | 962_U_1 |
| 962_U_2 | — | | | | — | — | — | — | | — | — | | 962_U_2 |
| 962_V_−1 | | | | — | — | — | — | — | | — | | — | 962_V_−1 |
| 962_V_+2 | — | — | — | | — | — | — | — | — | — | | — | 962_V_+2 |
| 962_Z_1 | | | — | — | — | — | — | — | | — | | — | 962_Z_1 |
| CNTL | 35.6% | 12.7% | 13.6% | 27.2% | 7.6% | 20.4% | 41.5% | 12.7% | 23.8% | 23.7% | 11.4% | 3.0% | CNTL |
| CASE | 34.7% | 8.7% | 8.3% | 29.8% | 8.8% | 15.3% | 35.3% | 8.2% | 21.4% | 21.9% | 7.8% | 4.9% | CASE |

| | 962_U_2 | 962_V_−1 | 982_V_+2 | 962_Z_1 | |
|---|---|---|---|---|---|
| 962_E_3 | 0.7189 | 0.3361 | 0.6552 | 0.6083 | 962_E_3 |
| 962_E_+2 | 0.3618 | 0.1028 | 0.3315 | 0.3764 | 962_E_+2 |
| 962_G_4 | 0.2854 | 0.1625 | 0.2663 | 0.2801 | 962_G_4 |
| 962_G_1 | 0.7442 | 0.2441 | 0.6164 | 0.5673 | 962_G_1 |
| 962_G_2 | 0.8726 | 0.4279 | 0.6058 | 0.5691 | 962_G_2 |
| 962_G_6 | 0.6195 | 0.2712 | 0.3766 | 0.3552 | 962_G_6 |
| 962_H_+2 | 0.5144 | 0.2246 | 0.2681 | 0.4391 | 962_H_+2 |
| 962_M_+2 | 0.133 | 0.2053 | 0.0779 | 0.4261 | 962_M_+2 |
| 962_P_−2 | 0.8121 | 0.2414 | 0.471 | 0.5539 | 962_P_−2 |
| 962_Q_−1 | 0.2688 | 0.1939 | 0.5462 | 0.6022 | 962_Q_−1 |
| 962_S_−1 | 0.3359 | 0.2835 | 0.0991 | 0.5538 | 962_S_−1 |
| 962_U_1 | 0.693 | 0.1535 | 0.3288 | 0.5037 | 962_U_1 |
| 962_U_2 | 0.5095 | 0.1516 | 0.4574 | 0.6757 | 962_U_2 |
| 962_V_−1 | | 0.1476 | 0.2689 | 0.2726 | 962_V_−1 |
| 962_V_+2 | — | | 0.3973 | 0.3009 | 962_V_+2 |
| 962_Z_1 | — | — | | 0.2968 | 962_Z_1 |
| CNTL | 23.8% | 34.8% | 4.5% | 31.9% | CNTL |
| CASE | 20.0% | 26.5% | 2.0% | 37.5% | CASE |

[0381] TABLE 26
HAPLOTYPE ANALYSIS OF BHR PHENOTYPE UK POPULATION

| | 845_R_1 | 845_R_−1 | 845_P_+1 | 845_K_1 | 845_K_−2 | 845_J_1 | 845_J_−1 | 845_I_−1 | 845_H_+1 | 845_H_−1 | 845_G_+1 | 845_F_+1 | 845_D_1 | 845_D_−1 | |
|---|---|---|---|---|---|---|---|---|---|---|---|---|---|---|---|
| 845_{—} | 0.4358 | 0.3636 | 0.4243 | 0.5414 | 0.1445 | 0.0893 | 0.7328 | 0.6729 | 0.8754 | 0.1964 | 0.8488 | 0.8809 | 0.0859 | [chemical structure] | 845_R_1 |
| R_1 | | | | | | | | | | | | | | | |
| 845_{—} | — | 0.4437 | 0.4676 | 0.5086 | 0.094 | [chemical structure] | 0.3194 | 0.6632 | 0.3213 | 0.0654 | 0.6852 | 0.6861 | 0.133 | [chemical structure] | 845_R_−1 |
| R_−1 | | | | | | | | | | | | | | | |
| 845_{—} | — | — | 0.212 | 0.4876 | 0.2276 | 0.1577 | 0.6931 | 0.5344 | 0.419 | 0.3042 | 0.4678 | 0.5175 | 0.1343 | 0.0725 | 845_P_+1 |
| P_+1 | | | | | | | | | | | | | | | |
| 845_{—} | — | — | | 1 | 0.3021 | [chemical structure] | 0.6043 | 0.9481 | 0.4873 | 0.3001 | 0.6846 | 0.9503 | 0.0978 | [chemical structure] | 845_K_1 |
| K_1 | | | | | | | | | | | | | | | |
| 845_{—} | — | — | | | 0.1299 | 0.0504 | 0.1195 | 0.247 | 0.1486 | 0.1872 | 0.2942 | 0.2783 | [chemical structure] | [chemical structure] | 845_K_−2 |
| K_−2 | | | | | | | | | | | | | | | |
| 845_{—} | | — | — | | | [chemical structure] | [chemical structure] | [chemical structure] | 0.1209 | 0.0621 | 0.1018 | 0.0957 | [chemical structure] | [chemical structure] | 845_J_1 |
| J_1 | | | | | | | | | | | | | | | |
| 845_{—} | — | — | — | | | | 0.5899 | 0.7923 | 0.6445 | 0.3626 | 0.9382 | 0.9304 | 0.1438 | [chemical structure] | 845_J_−1 |
| J_−1 | | | | | | | | | | | | | | | |
| R_1 | | | | | | | | | | | | | | | |
| 845_{—} | | — | — | — | — | — | | 1 | 0.6382 | 0.2665 | 0.7018 | 0.9058 | 0.2428 | [chemical structure] | 845_I_−1 |
| I_−1 | | | | | | | | | | | | | | | |
| 845_{—} | | | — | — | — | — | — | | 0.4994 | 0.1731 | 0.6698 | 0.8308 | 0.0868 | [chemical structure] | 845_H_+1 |
| H_+1 | | | | | | | | | | | | | | | |
| 845_{—} | | — | — | — | — | | — | | | 0.1454 | 0.3025 | 0.2504 | [chemical structure] | [chemical structure] | 845_H_−1 |
| H_+1 | | | | | | | | | | | | | | | |
| 845_{—} | | — | — | — | — | | — | — | — | | 0.7047 | 0.8022 | 0.1862 | [chemical structure] | 845_G_+1 |
| G_+1 | | | | | | | | | | | | | | | |
| 845_{—} | | — | — | — | — | | — | — | | — | | 1 | 0.2476 | [chemical structure] | 845_F_+1 |
| F_+1 | | | | | | | | | | | | | | | |
| 845_{—} | | — | — | — | — | | — | — | — | — | | | 0.2045 | [chemical structure] | 845_D_1 |
| D_1 | | | | | | | | | | | | | | | |
| 845_{—} | | — | — | — | — | | | | | — | | — | | [chemical structure] | 845_D_−1 |
| D_−1 | | | | | | | | | | | | | | | |
| CNTL | 13.6% | 26.6% | 6.4% | 0.4% | 27.0% | 36.6% | 37.5% | 12.6% | 19.3% | 43.6% | 13.2% | 18.8% | 0.0% | 9.3% | CNTL |
| CASE | 9.7% | 21.4% | 10.8% | 0.0% | 18.1% | 51.4% | 33.8% | 12.2% | 14.9% | 33.8% | 14.9% | 18.9% | 1.4% | 20.8% | CASE |

| | 847_K_1 | 847_J_+1 | 847_E_+1 | 847_D_−1 | 847_C_+1 | 847_A_2 | 847_A_1 | |
|---|---|---|---|---|---|---|---|---|
| 847_K_1 | 0.725 | 0.6597 | 0.704 | 0.9645 | 0.9194 | 0.9621 | 0.8974 | 847_K_1 |
| 847_J_+1 | — | 0.69 | 0.7023 | 0.6844 | 0.5625 | 0.8319 | 0.7757 | 847_J_+1 |
| 847_E_+1 | — | — | 0.8486 | 0.6266 | 0.8008 | 0.6334 | 0.8728 | 847_E_+1 |
| 847_D_−1 | — | — | — | 0.7215 | 0.5405 | 0.699 | 0.9003 | 847_D_−1 |
| 847_C_+1 | — | — | — | | 0.513 | 0.6701 | 0.8359 | 847_C_+1 |
| 847_A_2 | — | — | — | — | | 1 | 0.9999 | 847_A_2 |
| 847_A_1 | — | — | — | — | — | | 1 | 847_A_1 |
| CNTL | 3.6% | 2.9% | 12.8% | 16.5% | 17.8% | 5.4% | 1.3% | CNTL |
| CASE | 4.4% | 1.3% | 14.1% | 18.6% | 21.3% | 5.0% | 1.3% | CASE |

| | 874_R_+1 | 874_S_+1 | 874_T_−1 | 874_V_−1 | |
|---|---|---|---|---|---|
| 874_R_+1 | 0.1116 | 0.2338 | 0.3081 | 0.4057 | 874_R_+1 |
| 874_S_+1 | — | 0.2947 | 0.233 | 0.56 | 874_S_+1 |
| 874_T_−1 | — | — | 0.8989 | 0.9168 | 874_T_−1 |
| 874_V_−1 | — | — | — | 0.7379 | 874_V_−1 |
| CNTL | 41.5% | 38.0% | 48.9% | 16.9% | CNTL |
| CASE | 30.8% | 44.9% | 47.5% | 18.8% | CASE |

| | 803_K_3 | 803_K_2 | 803_I_1 | 803_I_−1 | 803_H_+1 | 803_E_+2 | |
|---|---|---|---|---|---|---|---|
| 803_K_3 | 0.1828 | 0.4394 | 0.3288 | 0.5003 | 0.3875 | 0.356 | 803_K_3 |
| 803_K_2 | | 1 | 0.6552 | 0.9425 | 0.5862 | 0.4151 | 803_K_2 |
| 803_I_1 | — | — | 0.5933 | 0.6726 | 0.4824 | 0.511 | 803_I_1 |
| 803_I_−1 | — | — | | 1 | 0.6153 | 0.4267 | 803_I_−1 |
| 803_H_+1 | — | — | — | | 0.4953 | 0.487 | 803_H_+1 |
| 803_E_+2 | — | | — | — | | 0.2821 | 803_E_+2 |
| CNTL | 1.1% | 0.4% | 28.6% | 0.4% | 25.7% | 42.4% | CNTL |
| CASE | 3.1% | 0.0% | 25.5% | 0.0% | 21.9% | 49.0% | CASE |

| | 962_E_3 | 962_E_+2 | 962_G_4 | 962_G_1 | 962_G_2 | 962_G_6 | 962_H_+2 | 962_M_+2 | 962_P_−2 | 962_Q_−1 | 962_S_−1 | 962_U_1 | |
|---|---|---|---|---|---|---|---|---|---|---|---|---|---|
| 962_E_3 | 0.515 | 0.7464 | 0.5152 | 0.3509 | 0.5785 | 0.6404 | 0.4499 | 0.4264 | 0.3429 | 0.4711 | 0.5547 | 0.6799 | 962_E_3 |
| 962_E_+2 | | 0.5802 | 0.5161 | 0.7985 | 0.1852 | 0.6109 | 0.4938 | 0.451 | 0.1519 | 0.2682 | 0.3983 | 0.7012 | 962_E_+2 |
| 962_G_4 | — | | 0.2549 | 0.2797 | 0.2378 | 0.2417 | 0.3093 | 0.2107 | 0.235 | 0.2861 | 0.2708 | 0.3498 | 962_G_4 |
| 962_G_1 | | — | | 0.4922 | 0.531 | 0.492 | 0.4817 | 0.4536 | 0.4058 | 0.4423 | 0.5459 | 0.432 | 962_G_1 |
| 962_G_2 | | | | | 0.2444 | 0.2212 | 0.4306 | 0.1508 | 0.6403 | 0.6035 | [chemical structure] | 0.4173 | 962_G_2 |
| 962_G_6 | | — | | — | | 0.354 | 0.2355 | 0.2219 | 0.0881 | 0.0733 | 0.1759 | 0.198 | 962_G_6 |
| 962_H_+2 | | — | — | — | — | | 0.1748 | 0.0984 | 0.2908 | 0.4093 | 0.2204 | 0.483 | 962_H_+2 |
| 962_M_+2 | | — | | | | — | | 0.2352 | 0.1972 | 0.2338 | 0.6025 | 0.4056 | 962_M_+2 |
| 962_P_−2 | | — | | | | | — | | 0.3843 | 0.7457 | 0.4412 | 0.7518 | 962_P_−2 |
| 962_Q_−1 | | — | | | | — | — | — | — | 0.465 | 0.5054 | 0.8408 | 962_Q_−1 |
| 962_S_−1 | | — | — | | | — | — | — | — | | 0.3107 | 0.5315 | 962_S_−1 |
| 962_U_1 | | — | — | — | — | — | — | — | — | — | | 0.7524 | 962_U_1 |
| 962_U_2 | | — | | | | — | — | — | — | — | — | | 962_U_2 |
| 962_V_−1 | | — | | | | — | — | — | — | — | | — | 962_V_−1 |
| 962_V_+2 | | | — | | | — | — | — | — | | — | | 962_V_+2 |
| 962_Z_1 | | | | | | | | | — | — | | — | 962_Z_1 |
| CNTL | 36.8% | 12.5% | 14.0% | 25.2% | 6.4% | 21.7% | 43.6% | 12.4% | 24.6% | 24.8% | 10.9% | 3.7% | CNTL |
| CASE | 32.1% | 10.0% | 85% | 28.9% | 10.2% | 16.7% | 35.2% | 7.1% | 19.3% | 20.2% | 6.8% | 4.5% | CASE |

| | 962_U_2 | 962_V_−1 | 962_V_+2 | 962_Z_1 | |
|---|---|---|---|---|---|
| 962_E_3 | 0.3051 | 0.2308 | 0.7642 | 0.2543 | 962_E_3 |
| 962_E_+2 | 0.1706 | 0.1462 | 0.6373 | 0.3188 | 962_E_+2 |
| 962_G_4 | 0.1569 | 0.1482 | 0.4131 | 0.2011 | 962_G_4 |
| 962_G_1 | 0.4464 | 0.1672 | 0.7516 | 0.178 | 962_G_1 |
| 962_G_2 | 0.2471 | 0.2202 | 0.5097 | 0.3565 | 962_G_2 |
| 962_G_6 | 0.462 | 0.2207 | 0.4478 | 0.1923 | 962_G_6 |
| 962_H_+2 | 0.1388 | 0.191 | 0.2337 | 0.2066 | 962_H_+2 |
| 962_M_+2 | 0.0629 | 0.1486 | 0.087 | 0.159 | 962_M_+2 |
| 962_P_−2 | 0.8329 | 0.1438 | 0.4439 | 0.3371 | 962_P_−2 |
| 962_Q_−1 | 0.3176 | 0.1324 | 0.6132 | 0.3637 | 962_Q_−1 |
| 962_S_−1 | 0.1474 | 0.2006 | 0.1081 | 0.2071 | 962_S_−1 |
| 962_U_1 | 0.5151 | 0.067 | 0.5727 | 0.3179 | 962_U_1 |
| 962_U_2 | 0.1868 | 0.0501 | 0.3777 | 0.2338 | 962_U_2 |
| 962_V_−1 | | 0.1357 | 0.3014 | 0.2074 | 962_V_−1 |
| 962_V_+2 | — | | 0.5311 | 0.1916 | 962_V_+2 |
| 962_Z_1 | | — | | 0.0924 | 962_Z_1 |
| CNTL | 25.0% | 34.4% | 4.5% | 30.0% | CNTL |
| CASE | 17.4% | 25.0% | 2.3% | 40.0% | CASE |

[0382] TABLE 27
HAPLOTYPE ANALYSIS OF BHR PHENOTYPE US POPULATION

| | 845_R_1 | 845_R_−1 | 845_P_+1 | 845_K_1 | 845_K_−2 | 845_J_1 | 845_J_−1 | 845_I_−1 | 845_H_−1 | 845_H_−1 | 845_G_+1 | 845_F_+1 | 845_D_1 | 845_D_−1 | |
|---|---|---|---|---|---|---|---|---|---|---|---|---|---|---|---|
| 845_{—} | 0.2168 | 0.1594 | 0.0827 | 0.0855 | 0.1679 | 0.2103 | 0.1745 | 0.2628 | 0.1094 | 0.1574 | 0.2903 | 0.2857 | 0.1568 | 0.2542 | 845_R_1 |
| R_1 | | | | | | | | | | | | | | | |
| 845_{—} | | 0.7742 | 0.1844 | 0.9763 | 0.9421 | 0.4599 | 0.4528 | 0.9788 | 0.0539 | 0.9001 | 0.9422 | 0.9765 | 0.9697 | 0.7545 | 845_R_−1 |
| R_−1 | | | | | | | | | | | | | | | |
| 845_{—} | — | | 0.0801 | 0.0886 | 0.1795 | 0.3146 | 0.1941 | 0.2962 | [chemical structure] | 0.1209 | 0.2818 | 0.3014 | 0.1605 | 0.2485 | 845_P_+1 |
| P_+1 | | | | | | | | | | | | | | | |
| 845_{—} | — | | — | 1 | 0.966 | 0.5089 | 0.2612 | 0.928 | [chemical structure] | 0.5848 | 0.8566 | 0.8208 | 0.8841 | 0.681 | 845_K_1 |
| K_1 | | | | | | | | | | | | | | | |
| 845_{—} | — | — | — | | 0.7742 | 0.4363 | 0.4784 | 0.9915 | 0.0651 | 0.8203 | 0.9969 | 0.9798 | 0.9669 | 0.7489 | 845_K_−2 |
| K_−2 | | | | | | | | | | | | | | | |
| 845_{—} | — | — | | | | 0.3787 | 0.4458 | 0.6187 | 0.0897 | 0.0573 | 0.744 | 0.6551 | 0.4122 | 0.7182 | 845_J_1 |
| J_1 | | | | | | | | | | | | | | | |
| 845_{—} | — | | | | — | | 0.383 | 0.5758 | 0.0656 | 0.2691 | 0.5926 | 0.5584 | 0.394 | 0.6422 | 845_J_−1 |
| J_−1 | | | | | | | | | | | | | | | |
| 845_{—} | — | | | | — | — | — | 1 | 0.0879 | 0.7864 | 0.8033 | 0.6122 | 0.9962 | 0.5973 | 845_I_−1 |
| I_−1 | | | | | | | | | | | | | | | |
| 845_{—} | — | | — | | | — | — | | 0.0752 | 0.0751 | 0.0988 | 0.133 | 0.0521 | 0.061 | 845_H_+1 |
| H_+1 | | | | | | | | | | | | | | | |
| 845_{—} | — | | | — | | — | — | — | — | 0.5841 | 0.7955 | 0.8275 | 0.6282 | 0.5876 | 845_H_−1 |
| H_−1 | | | | | | | | | | | | | | | |
| 845_{—} | | | — | | | — | — | | | | 1 | 0.684 | 0.9967 | 0.5614 | 845_G_+1 |
| G_+1 | | | | | | | | | | | | | | | |
| 845_{—} | | | | — | | — | — | — | | | | 1 | 0.9645 | 0.6021 | 845_F_+1 |
| F_+1 | | | | | | | | | | | | | | | |
| 845_{—} | — | | — | | | — | — | — | | — | — | | 1 | 0.4079 | 845_D_1 |
| D_1 | | | | | | | | | | | | | | | |
| 845_{—} | — | | — | — | — | — | — | — | | | — | — | | 0.6307 | 845_D_−1 |
| D_−1 | | | | | | | | | | | | | | | |
| CNTL | 17.1% | 32.5% | 6.5% | 0.0% | 32.5% | 30.9% | 36.4% | 13.3% | 20.1% | 48.1% | 13.2% | 17.5% | 0.7% | 11.0% | CNTL |
| CASE | 0.0% | 35.7% | 21.4% | 0.0% | 35.7% | 42.9% | 21.4% | 14.3% | 0.0% | 57.1% | 14.3% | 14.3% | 0.0% | 16.7% | CASE |

| | 847_K_1 | 847_J_+1 | 847_E_+1 | 847_D_−1 | 847_C_+1 | 847_A_2 | 847_A_1 | |
|---|---|---|---|---|---|---|---|---|
| 847_K_1 | 0.6027 | 0.1218 | 0.0756 | [chemical structure] | [chemical structure] | 0.0971 | 0.219 | 847_K_1 |
| 847_J_+1 | — | 0.6146 | [chemical structure] | [chemical structure] | [chemical structure] | 0.0668 | 0.2001 | 847_J_+1 |
| 847_E_+1 | — | — | 0.3721 | 0.11 | [chemical structure] | 0.1021 | 0.1828 | 847_E_+1 |
| 847_D_−1 | — | — | — | 0.0779 | 0.0563 | [chemical structure] | [chemical structure] | 847_D_−1 |
| 847_C_+1 | — | — | — | — | 0.077 | [chemical structure] | 0.0514 | 847_C_+1 |
| 847_A_2 | — | — | — | — | — | 0.3669 | 0.117 | 847_A_2 |
| 847_A_1 | — | — | — | — | — | — | 1 | 847_A_1 |
| CNTL | 7.3% | 8.4% | 12.3% | 17.6% | 18.2% | 9.1% | 0.7% | CNTL |
| CASE | 0.0% | 0.0% | 0.0% | 0.0% | 0.0% | 0.0% | 0.0% | CASE |

| | 874_R_+1 | 874_S_+1 | 874_T_−1 | 874_V_−1 | |
|---|---|---|---|---|---|
| 874_R_+1 | 0.3818 | 0.0621 | 0.4429 | 0.115 | 874_R_+1 |
| 874_S_+1 | — | 0.4382 | 0.2736 | 0.5583 | 874_S_+1 |
| 874_T_−1 | — | — | 0.7977 | 0.9652 | 874_T_−1 |
| 874_V_−1 | — | — | — | 1 | 874_V_−1 |
| CNTL | 37.0% | 42.2% | 48.1% | 18.8% | CNTL |
| CASE | 21.4% | 31.3% | 43.8% | 18.8% | CASE |

| | 803_K_3 | 803_K_2 | 803_I_1 | 803_I_−1 | 803_H_+1 | 803_E_+2 | |
|---|---|---|---|---|---|---|---|
| 803_K_3 | 1 | 0.182 | 0.2121 | 0.782 | 0.8147 | 0.3784 | 803_K_3 |
| 803_K_2 | — | 0.1034 | [chemical structure] | 0.0804 | 0.1419 | [chemical structure] | 803_K_2 |
| 803_I_1 | — | — | 0.1714 | 0.1246 | 0.3257 | 0.3586 | 803_I_1 |
| 803_I_−1 | — | — | — | 1 | 0.9227 | 0.2631 | 803_I_−1 |
| 803_H_+1 | — | — | — | — | 1 | 0.5364 | 803_H_+1 |
| 803_E_+2 | — | — | — | — | — | 0.3214 | 803_E_+2 |
| CNTL | 0.6% | 0.0% | 27.6% | 0.0% | 24.4% | 47.4% | CNTL |
| CASE | 0.0% | 5.6% | 44.4% | 0.0% | 22.2% | 33.3% | CASE |

| | 962_E_3 | 962_E_+2 | 962_G_4 | 962_G_1 | 962_G_2 | 962_G_6 | 962_H_+2 | 962_M_+2 | 962_P_−2 | 962_Q_−1 | 962_S_−1 | 962_U_1 | |
|---|---|---|---|---|---|---|---|---|---|---|---|---|---|
| 962_E_3 | 0.2478 | [chemical structure] | 0.5963 | 0.2248 | 0.1369 | 0.5509 | 0.1992 | 0.65 | 0.3174 | 0.5385 | 0.6246 | 0.0854 | 962_E_3 |
| 962_E_+2 | | 0.3791 | 0.3768 | 0.2434 | 0.0858 | 0.229 | 0.3403 | 0.4079 | 0.1189 | 0.1552 | 0.3781 | 0.1263 | 962_E_+2 |
| 962_G_4 | | | 1 | 0.7616 | 0.4552 | 0.6851 | 0.6567 | 0.8356 | 0.529 | 0.5598 | 0.8179 | 0.4133 | 962_G_4 |
| 962_G_1 | | | | 0.7656 | 0.3307 | 0.6798 | 0.8991 | 0.9987 | 0.6566 | 0.5303 | 0.9899 | 0.3312 | 962_G_1 |
| 962_G_2 | | | | | 0.6172 | 0.3257 | 0.4824 | 0.557 | 0.1541 | 0.1814 | 0.6406 | 0.0754 | 962_G_2 |
| 962_G_6 | | | — | | — | 0.4658 | 0.7235 | 0.6973 | 0.3602 | 0.5274 | 0.6737 | 0.3596 | 962_G_6 |
| 962_H_+2 | | | | | — | — | 1 | 0.7252 | 0.287 | 0.8698 | 0.7496 | 0.4577 | 962_H_+2 |
| 962_M_+2 | — | | — | | — | — | — | 1 | 0.502 | 0.677 | 0.7965 | 0.755 | 962_M_+2 |
| 962_P_−2 | | | — | — | — | — | | | 0.2469 | 0.1296 | 0.4992 | 0.292 | 962_P_−2 |
| 962_Q_−1 | — | | — | — | — | — | | | — | 0.4707 | 0.6638 | 0.2631 | 962_Q_−1 |
| 962_S_−1 | | | — | | — | | | — | — | — | 0.6849 | 0.7862 | 962_S_−1 |
| 962_U_1 | | | | — | — | | | | | — | | 0.2932 | 962_U_1 |
| 962_U_2 | | | — | — | — | | | | | — | | — | 962_U_2 |
| 962_V_−1 | | | — | — | — | — | — | | | — | — | — | 962_V_−1 |
| 962_V_+2 | | | — | | — | — | | | | — | — | — | 962_V_+2 |
| 962_Z_1 | | | | — | — | | | | — | — | — | | 962_Z_1 |
| CNTL | 33.6% | 13.0% | 12.9% | 30.8% | 9.7% | 177% | 37.7% | 13.2% | 22.4% | 21.7% | 12.2% | 1.9% | CNTL |
| CASE | 50.0% | 0.0% | 7.1% | 35.7% | 0.0% | 7.1% | 35.7% | 14.3% | 40.0% | 33.3% | 14.3% | 7.1% | CASE |

| | 962_U_2 | 962_V_−1 | 962_V_+2 | 962_Z_1 | |
|---|---|---|---|---|---|
| 962_E_3 | 0.4772 | 0.6165 | 0.2995 | 0.1623 | 962_E_3 |
| 962_E_+2 | 0.1087 | 0.3523 | 0.0993 | 0.1578 | 962_E_+2 |
| 962_G_4 | 0.5146 | 0.874 | 0.4457 | 0.2758 | 962_G_4 |
| 962_G_1 | 0.4157 | 0.5854 | 0.6819 | 0.4627 | 962_G_1 |
| 962_G_2 | 0.1463 | 0.517 | 0.2801 | 0.2 | 962_G_2 |
| 962_G_6 | 0.4287 | 0.6038 | 0.4528 | 0.4868 | 962_G_6 |
| 962_H_+2 | 0.666 | 0.9967 | 0.7213 | 0.5899 | 962_H_+2 |
| 962_M_+2 | 0.588 | 0.9449 | 0.7439 | 0.5583 | 962_M_+2 |
| 962_P_−2 | 0.2324 | 0.3661 | 0.3176 | 0.2698 | 962_P_−2 |
| 962_Q_−1 | 0.3068 | 0.4758 | 0.4862 | 0.2157 | 962_Q_−1 |
| 962_S_−1 | 0.5596 | 0.946 | 0.6896 | 0.569 | 962_S_−1 |
| 962_U_1 | 0.2042 | 0.6576 | 0.2103 | 0.1691 | 962_U_1 |
| 962_U_2 | 0.315 | 0.4167 | 0.379 | 0.1139 | 962_U_2 |
| 962_V_−1 | | 1 | 0.6162 | 0.5854 | 962_V_−1 |
| 962_V_+2 | | | 1 | 0.2332 | 962_V_+2 |
| 962_Z_1 | | | — | 0.3845 | 962_Z_1 |
| CNTL | 21.7% | 35.4% | 4.7% | 35.5% | CNTL |
| CASE | 35.7% | 35.7% | 0.0% | 21.4% | CASE |

[0383] All SNP combinations in Tables 25, 26, and 27 that demonstrated a significant difference (p≦0.05) in the distribution of frequencies of the four haplotypes between the cases and the control populations were further analyzed to identify individual haplotypes that were also significant. Table 28 presents the haplotypes that were significantly associated, at the 0.05 level of significance, with the BHR phenotype. Haplotypes with higher allele frequency in the case population than in the control population acted as risk factors that increased the susceptibility to asthma. Haplotypes with lower allele frequencies in the case population than in the control population acted as protective factors that decreased the susceptibility to asthma. For Gene 845, three haplotypes were susceptibility haplotypes, associated with an increased risk of asthma at the 0.05 level of significance in the combined population. They were haplotypes G/G (SNPs R1/K−2, p=0.0144), C/T (SNPs K1/D−1, p=0.0035) and G/C (SNPs K−2/H+1, p=0.0153). One haplotype, C/C (SNPs K1/D−1, p=0.004), was protective in the combined population. In the UK population, seven haplotypes were susceptibility haplotypes. They were haplotypes T/G (SNPs R−1/J1, p=0.0209), G/T (SNPs K−2/D1 p=0.0378), G/C (SNPs J1/D1, p=0.0234), A/T (SNPs J1/D1, p=0.0003), C/T (SNPs H−1/D1, p=0.0389), C/T (SNPs D1/D-1, p=0.007) and T/T (SNPs D1/D−1, p=0.0326). There were two haplotypes that were protective in the UK population, A/C (SNPs J1/D1, p=0.0133) and C/C (SNPs D1/D−1, p=0.003). In the US population, haplotype C/G (SNPs K1/H+1, p=0.0494) was a protective haplotype. Two haplotypes were susceptibility haplotypes in the US population, T/C (SNPs P+1/H+1, p=0.0482) and C/C (SNPs K1/H+1, p=0.0329). For Gene 847, four haplotypes were protective in the US population. They were haplotypes G/C (SNPs K1/D−1, p=0.0393), G/G (SNPs K1/C+1, p=0.036), C/C (SNPs J+1/D−1, p=0.0386), C/G (SNPs J+1/C+1, p=0.0373). Seven haplotypes were susceptibility haplotypes in the US population. They were haplotypes G/C (SNPs K1/D−1, p=0.0164), G/A (SNPs K1/C+1, p=0.0217), C/T (SNPs J+1/E+1, p=0.0259), C/A (SNPs J+1/D−1, p=0.0165), C/A (SNPs J+1/C+1 0.0219), A/C (SNPs D−1/A2, p=0.0423) and A/C (SNPs C+1/A2, p=0.0495). For Gene 803, two haplotypes were protective in the US population. They were haplotypes G/C (SNPs K2/I1, p=0.047) and G/C (SNPs K2/E+2, p=0.047). For Gene 962, haplotype A/C (SNPs G2/S−1, p=0.0396) was a susceptibility haplotype in the UK population.

TABLE 28

| | | | | | |
|---|---|---|---|---|---|
| | SNP | | | | |
| | COMBI- | HAPLO- | FREQUENCIES | | P- |
| GENE | NATION | TYPE | CNTL | CASE | VALUE |

BHR Combined
US and UK

| | | | | | |
|---|---|---|---|---|---|
| 845 | R1/K−2 | GG | 0.56247 | 0.707124 | 0.0144 |
| 845 | K1/D−1 | CC | 0.898545 | 0.797619 | 0.004 |
| 845 | K1/D−1 | CT | 0.099078 | 0.202381 | 0.0035 |
| 845 | K−2/H+1 | GC | 0.514469 | 0.665 | 0.0153 |

BHR
UK Population

| | | | | | |
|---|---|---|---|---|---|
| 845 | R−1/J1 | TG | 0 | 0.039657 | 0.0209 |
| 845 | K−2/D1 | GT | 0 | 0.013974 | 0.0378 |
| 845 | J1/D1 | GC | 0.365672 | 0.514095 | 0.0234 |
| 845 | J1/D1 | AC | 0.634328 | 0.471596 | 0.0133 |
| 845 | J1/D1 | AT | 0 | 0.014308 | 0.0003 |
| 845 | H−1/D1 | CT | 0 | 0.013795 | 0.0389 |
| 845 | D1/D−1 | CC | 0.907143 | 0.791667 | 0.003 |
| 845 | D1/D−1 | CT | 0.092857 | 0.194444 | 0.007 |
| 845 | D1/D−1 | TT | 0 | 0.013889 | 0.0326 |
| 962 | G2/S−1 | AC | 0.010124 | 0.042804 | 0.0396 |

BHR
US Population

| | | | | | |
|---|---|---|---|---|---|
| 845 | P+1/H+1 | TC | 0.052119 | 0.214286 | 0.0482 |
| 845 | K1/H+1 | CC | 0.798701 | 1 | 0.0329 |
| 845 | K1/H+1 | CG | 0.201299 | 0 | 0.0494 |
| 847 | K1/D−1 | GA | 0.750602 | 1 | 0.0164 |
| 847 | K1/D−1 | GC | 0.176239 | 0 | 0.0393 |
| 847 | K1/C+1 | GA | 0.745012 | 1 | 0.0217 |
| 847 | K1/C+1 | GG | 0.181817 | 0 | 0.036 |
| 847 | J+1/E+1 | CT | 0.791905 | 1 | 0.0259 |
| 847 | J+1/D−1 | CA | 0.738791 | 1 | 0.0165 |
| 847 | J+1/D−1 | CC | 0.176558 | 0 | 0.0386 |
| 847 | J+1/C+1 | CA | 0.733303 | 1 | 0.0219 |
| 847 | J+1/C+1 | CG | 0.182036 | 0 | 0.0373 |
| 847 | D−1/A2 | AC | 0.772011 | 1 | 0.0423 |
| 847 | C+1/A2 | AC | 0.761836 | 1 | 0.0495 |
| 803 | K2/I1 | GC | 0.724359 | 0.5 | 0.047 |
| 803 | K2/E+2 | GC | 0.724359 | 0.5 | 0.047 |

[0384] c. Total IgE

[0385] In Tables 29, 30 and 31, the haplotype analysis (2-at-a-time) is presented for the combined, the UK and the US populations, respectively. A single SNP combination in Gene 845 is significant in the US population: SNPs R 1 & R−1 (p=0.0355). Fourteen SNP combinations in Gene 962 are significant in the combined and in the UK and US population alone: SNPs E 3 & G 1 (US p=0.0398), SNPs E+2 & G 1 (combined p=0.0249), SNPs E+2 & V−1 (combined p=0.0305), SNPs G 4 & G 1 (combined p=0.0089, UK p=0.0282), SNPs G 4 & G 6 (UK p=0.0376), SNPs G 4 & Q−1 (US p=0.0263), SNPs G 4 & U 2 (US p=0.0168), SNPs G 4 & V+2 (US p=0.0052), SNPs G 1 & P−2 (combined p=0.0268), SNPs G 1 & Q−1 (combined p=0.0069, UK p=0.0375, US p=0.025), SNPs G 1 & U 2 (US p=0.0194), SNPs G 6 & S−1 (UK p=0.0112), SNPs H+2 & S−1 (combined p=0.0426) and SNPs M+2 & P−2 (US p=0.0096).

TABLE 29
HAPLOTYPE ANALYSIS OF TOTAL IgE PHENOTYPE COMBINED US/UK POPULATION

| | 845_R_1 | 845_R_−1 | 845_P_+1 | 845_K_1 | 845_K_−2 | 845_J_1 | 845_J_−1 | 845_I_−1 | 845_H_+1 | 845_H_−1 | 845_G_+1 | 845_F_+1 | 845_D_1 | 845_D_−1 | |
|---|---|---|---|---|---|---|---|---|---|---|---|---|---|---|---|
| 845_{—} | 0.8877 | 0.1664 | 0.3567 | 0.9097 | 0.2478 | 0.5528 | 0.6568 | 0.9102 | 0.5597 | 0.7751 | 0.6319 | 0.699 | 0.921 | 0.7729 | 845_R_1 |
| R_1 | | | | | | | | | | | | | | | |
| 845_{—} | — | 0.0901 | 0.1208 | 0.1986 | 0.0797 | 0.288 | 0.2058 | 0.2832 | 0.0682 | 0.2866 | 0.3337 | 0.322 | 0.1405 | 0.2124 | 845_R_−1 |
| R_−1 | | | | | | | | | | | | | | | |
| 845_{—} | — | — | 0.1257 | 0.3338 | 0.1405 | 0.4922 | 0.321 | 0.3264 | 0.2647 | 0.4947 | 0.2845 | 0.318 | 0.275 | 0.3822 | 845_P_+1 |
| P_+1 | | | | | | | | | | | | | | | |
| 845_{—} | — | — | — | 1 | 0.3383 | 0.424 | 0.6671 | 0.8301 | 0.5338 | 0.6229 | 0.7208 | 0.938 | 0.7972 | 0.6038 | 845_K_1 |
| K_1 | | | | | | | | | | | | | | | |
| 845_{—} | — | — | — | — | 0.1677 | 0.2421 | 0.2833 | 0.2178 | 0.0993 | 0.3013 | 0.3282 | 0.2824 | 0.1951 | 0.2697 | 845_K_−2 |
| K_−2 | | | | | | | | | | | | | | | |
| 845_{—} | — | — | — | — | — | 0.2952 | 0.0942 | 0.3088 | 0.4593 | 0.681 | 0.4093 | 0.6186 | 0.3818 | 0.4658 | 845_J_1 |
| J_1 | | | | | | | | | | | | | | | |
| 845_{—} | — | — | — | — | — | — | 0.6062 | 0.815 | 0.2347 | 0.4244 | 0.6932 | 0.9265 | 0.7733 | 0.571 | 845_J_−1 |
| J_−1 | | | | | | | | | | | | | | | |
| 845_{—} | — | — | — | — | — | — | — | 0.7609 | 0.5615 | 0.6564 | 0.3315 | 0.7179 | 0.8779 | 0.4486 | 845_I_−1 |
| I_−1 | | | | | | | | | | | | | | | |
| 845_{—} | — | — | — | — | — | — | — | — | 0.4431 | 0.4406 | 0.7 | 0.8354 | 0.3571 | 0.5568 | 845_H_+1 |
| H_+1 | | | | | | | | | | | | | | | |
| 845_{—} | — | — | — | — | — | — | — | — | — | 0.4795 | 0.761 | 0.7321 | 0.6216 | 0.7728 | 845_H_−1 |
| H_−1 | | | | | | | | | | | | | | | |
| 845_{—} | — | — | — | — | — | — | — | — | — | — | 0.6628 | 0.7036 | 0.8653 | 0.6024 | 845_G_+1 |
| G_+1 | | | | | | | | | | | | | | | |
| 845_{—} | — | — | — | — | — | — | — | — | — | — | | 1 | 0.9464 | 0.7782 | 845_F_+1 |
| F_+1 | | | | | | | | | | | | | | | |
| 845_{—} | — | — | — | — | — | — | — | — | — | — | — | — | 0.3966 | 0.8431 | 845_D_1 |
| D_1 | | | | | | | | | | | | | | | |
| 845_{—} | — | — | — | | — | — | — | — | — | — | — | — | — | 0.505 | 845_D_−1 |
| D_−1 | | | | | | | | | | | | | | | |
| CNTL | 14.8% | 28.7% | 6.5% | 0.2% | 28.9% | 34.5% | 37.1% | 12.8% | 19.6% | 45.2% | 13.2% | 18.4% | 0.2% | 9.9% | CNTL |
| CASE | 14.1% | 21.1% | 10.8% | 0.0% | 22.1% | 40.0% | 40.0% | 11.5% | 16.2% | 41.4% | 14.6% | 18.5% | 0.8% | 12.1% | CASE |

| | 847_K_1 | 847_J_+1 | 847_E_+1 | 847_D_−1 | 847_C_+1 | 847_A_2 | 847_A_1 | |
|---|---|---|---|---|---|---|---|---|
| 847_K_1 | 1 | 0.7224 | 0.5704 | 0.9785 | 0.8175 | 0.4686 | 0.7671 | 847_K_1 |
| 847_J_+1 | — | 0.4732 | 0.4748 | 0.6465 | 0.4706 | 0.8183 | 0.5835 | 847_J_+1 |
| 847_E_+1 | — | — | 0.4629 | 0.5443 | 0.6655 | 0.8942 | 0.7853 | 847_E_+1 |
| 847_D_+1 | — | — | — | 0.7795 | 0.8749 | 0.9481 | 0.9318 | 847_D_−1 |
| 847_C_+1 | — | — | — | — | 0.3696 | 0.8263 | 0.7704 | 847_C_+1 |
| 847_A_2 | — | — | — | — | — | 0.7007 | 0.8952 | 847_A_2 |
| 847_A_1 | — | — | — | — | — | — | 1 | 847_A_1 |
| CNTL | 4.9% | 4.9% | 12.6% | 16.9% | 17.9% | 6.7% | 1.0% | CNTL |
| CASE | 5.0% | 3.0% | 15.2% | 17.9% | 21.5% | 7.5% | 0.8% | CASE |

| | 874_R_+1 | 874_S_+1 | 874_T_−1 | 874_V_−1 | |
|---|---|---|---|---|---|
| 874_R_+1 | 0.1181 | 0.476 | 0.4027 | 0.361 | 874_R_+1 |
| 874_S_+1 | — | 0.8413 | 0.4528 | 0.4627 | 874_S_+1 |
| 874_T_−1 | — | — | 0.8447 | 0.4184 | 874_T_−1 |
| 874_V_−1 | — | — | — | 0.3785 | 874_V_−1 |
| CNTL | 39.9% | 39.5% | 48.6% | 17.6% | CNTL |
| CASE | 32.0% | 40.4% | 50.0% | 21.0% | CASE |

| | 803_K_3 | 803_K_2 | 803_I_1 | 803_I_−1 | 803_H_+1 | 803_E_+2 | |
|---|---|---|---|---|---|---|---|
| 803_K_3 | 0.3637 | 0.234 | 0.5258 | 0.517 | 0.5151 | 0.5526 | 803_K_3 |
| 803_K_2 | — | 0.1402 | 0.3257 | 0.3147 | 0.3245 | 0.3302 | 803_K_2 |
| 803_I_1 | — | — | 0.9113 | 0.9885 | 0.9273 | 0.6626 | 803_I_1 |
| 803_I_−1 | — | — | — | 1 | 0.7904 | 0.8594 | 803_I_−1 |
| 803_H_+1 | — | — | — | — | 0.7311 | 0.9108 | 803_H_+1 |
| 803_E_+2 | — | — | — | — | — | 0.8402 | 803_E_+2 |
| CNTL | 0.9% | 0.2% | 28.2% | 0.2% | 25.2% | 44.2% | CNTL |
| CASE | 2.2% | 1.5% | 28.8% | 0.0% | 23.5% | 45.4% | CASE |

| | 962_E_3 | 962_E_+2 | 962_G_4 | 962_G_1 | 962_G_2 | 962_G_6 | 962_H_+2 | 962_M_+2 | 962_P_−2 | 962_Q_−1 | 962_S_−1 | 962_U_1 | |
|---|---|---|---|---|---|---|---|---|---|---|---|---|---|
| 962_E_3 | 0.4753 | 0.1281 | 0.1867 | 0.1135 | 0.6053 | 0.556 | 0.3468 | 0.6678 | 0.8706 | 0.8684 | 0.5581 | 0.8916 | 962_E_3 |
| 962_E_+2 | — | 0.0677 | 0.0562 | [chemical structure] | 0.1588 | 0.1748 | 0.074 | 0.1769 | 0.1882 | 0.2181 | 0.1578 | 0.1515 | 962_E_+2 |
| 962_G_4 | — | — | [chemical structure] | [chemical structure] | 0.1223 | 0.081 | 0.0657 | 0.1223 | 0.2134 | 0.232 | 0.0512 | 0.1698 | 962_G_4 |
| 962_G_1 | — | — | — | [chemical structure] | 0.1715 | 0.0856 | [chemical structure] | 0.1718 | [chemical structure] | [chemical structure] | 0.1315 | 0.1675 | 962_G_1 |
| 962_G_2 | — | — | — | — | 1 | 0.4859 | 0.5186 | 0.8108 | 0.9667 | 0.9888 | 0.4504 | 0.6718 | 962_G_2 |
| 962_G_6 | — | — | — | — | — | 0.3205 | 0.3003 | 0.2838 | 0.6461 | 0.6884 | 0.1011 | 0.168 | 962_G_6 |
| 962_H_+2 | — | — | — | — | — | — | 0.117 | 0.1524 | 0.4959 | 0.431 | [chemical structure] | 0.5122 | 962_H_+2 |
| 962_M_+2 | — | — | — | — | — | — | — | 0.6553 | 0.7965 | 0.8171 | 0.7357 | 0.8275 | 962_M_+2 |
| 962_P_−2 | — | — | — | — | — | — | — | — | 0.7323 | 0.6335 | 0.6199 | 0.9552 | 962_P_−2 |
| 962_Q_−1 | — | — | — | — | — | — | — | — | — | 0.8195 | 0.6502 | 0.9595 | 962_Q_−1 |
| 962_S_−1 | — | — | — | — | — | — | — | — | — | — | 0.3507 | 0.5865 | 962_S_−1 |
| 962_U_1 | — | — | — | — | — | — | — | — | — | — | — | 0.7821 | 962_U_1 |
| 962_U_2 | — | — | — | — | — | — | — | — | — | — | — | — | 962_U_2 |
| 962_V_−1 | — | — | — | — | — | — | — | — | — | — | — | — | 962_V_−1 |
| 962_V_+2 | — | — | — | — | — | — | — | — | — | — | — | — | 962_V_+2 |
| 962_Z_1 | — | — | — | — | — | — | — | — | — | — | — | — | 962_Z_1 |
| CNTL | 35.6% | 12.7% | 13.6% | 27.2% | 7.6% | 20.4% | 41.5% | 12.7% | 23.8% | 23.7% | 11.4% | 3.0% | CNTL |
| CASE | 32.1% | 6.8% | 7.1% | 37.0% | 7.7% | 16.2% | 34.0% | 10.7% | 25.4% | 24.6% | 8.3% | 3.6% | CASE |

| | 962_U_2 | 962_V_−1 | 962_V_+2 | 962_Z_1 | |
|---|---|---|---|---|---|
| 962_E_3 | 0.8737 | 0.2619 | 0.4308 | 0.45 | 962_E_3 |
| 962_E_+2 | 0.2713 | [chemical structure] | 0.1741 | 0.184 | 962_E_+2 |
| 962_G_4 | 0.2206 | 0.1478 | 0.2075 | 0.2068 | 962_G_4 |
| 962_G_1 | [chemical structure] | 0.1068 | 0.1444 | 0.1705 | 962_G_1 |
| 962_G_2 | 0.9814 | 0.805 | 0.9191 | 0.9782 | 962_G_2 |
| 962_G_6 | 0.7122 | 0.5476 | 0.5849 | 0.6686 | 962_G_6 |
| 962_H_+2 | 0.2878 | 0.1857 | 0.2384 | 0.2674 | 962_H_+2 |
| 962_M_+2 | 0.4814 | 0.6648 | 0.6777 | 0.9384 | 962_M_+2 |
| 962_P_−2 | 0.9691 | 0.8527 | 0.7035 | 0.6705 | 962_P_−2 |
| 962_Q_−1 | 0.7251 | 0.7745 | 0.8439 | 0.832 | 962_Q_−1 |
| 962_S_−1 | 0.7682 | 0.473 | 0.4304 | 0.784 | 962_S_−1 |
| 962_U_1 | 0.9682 | 0.4878 | 0.8 | 0.8671 | 962_U_1 |
| 962_U_2 | 1 | 0.6732 | 0.8443 | 0.9975 | 962_U_2 |
| 962_V_−1 | — | 0.3994 | 0.8052 | 0.6563 | 962_V_−1 |
| 962_V_+2 | — | — | 0.8112 | 0.848 | 962_V_+2 |
| 962_Z_1 | — | — | — | 1 | 962_Z_1 |
| CNTL | 23.8% | 34.8% | 4.5% | 31.9% | CNTL |
| CASE | 23.9% | 30.4% | 3.5% | 31.5% | CASE |

[0386] TABLE 30
HAPLOTYPE ANALYSIS OF TOTAL IgE PHENOTYPE UK POPULATION

| | 845_R_1 | 845_R_−1 | 845_P_+1 | 845_K_1 | 845_K_−2 | 845_J_1 | 845_J_−1 | 845_I_−1 | 845_H_+1 | 845_H_−1 | 845_G_+1 | 845_F_+1 | 845_D_1 | 845_D_−1 | |
|---|---|---|---|---|---|---|---|---|---|---|---|---|---|---|---|
| 845_{—} | 0.6245 | 0.4023 | 0.5577 | 0.7546 | 0.4747 | 0.6289 | 0.864 | 0.8681 | 0.4819 | 0.6939 | 0.5258 | 0.5721 | 0.3188 | 0.6705 | 845_R_1 |
| R_1 | | | | | | | | | | | | | | | |
| 845_{—} | — | 0.2308 | 0.3701 | 0.4518 | 0.5377 | 0.3954 | 0.4301 | 0.3487 | 0.2214 | 0.4435 | 0.3928 | 0.3966 | 0.0989 | 0.4124 | 845_R_−1 |
| R_−1 | | | | | | | | | | | | | | | |
| 845_{—} | — | — | 0.3784 | 0.5805 | 0.382 | 0.8256 | 0.4869 | 0.6381 | 0.5489 | 0.7792 | 0.5012 | 0.6447 | 0.2661 | 0.4538 | 845_P_+1 |
| P_+1 | | | | | | | | | | | | | | | |
| 845_{—} | — | — | — | 1 | 0.4822 | 0.6095 | 0.726 | 0.9105 | 0.6231 | 0.6843 | 0.5994 | 0.9638 | 0.2114 | 0.5816 | 845_K_1 |
| K_1 | | | | | | | | | | | | | | | |
| 845_{—} | — | — | — | — | 0.2842 | 0.4374 | 0.4736 | 0.3916 | 0.262 | 0.4658 | 0.4576 | 0.4679 | 0.1238 | 0.4401 | 845_K_−2 |
| K_−2 | | | | | | | | | | | | | | | |
| 845_{—} | — | — | — | — | — | 0.4798 | 0.264 | 0.559 | 0.6743 | 0.8718 | 0.561 | 0.8951 | 0.2368 | 0.7503 | 845_J_1 |
| J_1 | | | | | | | | | | | | | | | |
| 845_{—} | — | — | — | — | — | — | 0.6392 | 0.8437 | 0.3453 | 0.5816 | 0.6365 | 0.9516 | 0.2641 | 0.5881 | 845_J_−1 |
| J_−1 | | | | | | | | | | | | | | | |
| 845_{—} | — | — | — | — | — | — | — | 0.8603 | 0.6469 | 0.6953 | 0.2242 | 0.7965 | 0.2795 | 0.7392 | 845_I_−1 |
| I_−1 | | | | | | | | | | | | | | | |
| 845_{—} | — | — | — | — | — | — | — | — | 0.5564 | 0.5493 | 0.68 | 0.9185 | 0.1306 | 0.6331 | 845_H_+1 |
| H_+1 | | | | | | | | | | | | | | | |
| 845_{—} | — | — | — | — | — | — | — | — | — | 0.4918 | 0.7011 | 0.7365 | 0.2415 | 0.7078 | 845_H_−1 |
| H_−1 | | | | | | | | | | | | | | | |
| 845_{—} | — | — | — | — | — | — | — | — | — | — | 0.5116 | 0.3714 | 0.218 | 0.5832 | 845_G_+1 |
| G_+1 | | | | | | | | | | | | | | | |
| 845_{—} | — | — | — | — | — | — | — | — | — | — | — | 1 | 0.3304 | 0.7673 | 845_F_+1 |
| F_+1 | | | | | | | | | | | | | | | |
| 845_{—} | — | — | — | — | — | — | — | — | — | — | — | — | 0.267 | 0.2239 | 845_D_1 |
| D_1 | | | | | | | | | | | | | | | |
| 845_{—} | — | — | — | — | — | — | — | — | — | — | — | — | — | 0.4474 | 845_D_−1 |
| D_−1 | | | | | | | | | | | | | | | |
| CNTL | 13.6% | 26.6% | 6.4% | 0.4% | 27.0% | 36.6% | 37.5% | 12.6% | 19.3% | 43.6% | 13.2% | 18.8% | 0.0% | 9.3% | CNTL |
| CASE | 15.4% | 20.2% | 9.4% | 0.0% | 21.0% | 40.6% | 40.6% | 11.3% | 16.0% | 39.6% | 16.0% | 18.9% | 1.0% | 11.8% | CASE |

| | 847_K_1 | 847_J_+1 | 847_E_+1 | 847_D_−1 | 847_C_+1 | 847_A_2 | 847_A_1 | |
|---|---|---|---|---|---|---|---|---|
| 847_K_1 | 1 | 0.9807 | 0.3563 | 0.7223 | 0.4804 | 0.2596 | 0.9246 | 847_K_1 |
| 847_J_+1 | — | 1 | 0.4687 | 0.5717 | 0.3727 | 0.7772 | 0.8857 | 847_J_+1 |
| 847_E_+1 | — | — | 0.2494 | 0.2263 | 0.3632 | 0.5525 | 0.6005 | 847_E_+1 |
| 847_D_−1 | — | — | — | 0.3355 | 0.2587 | 0.708 | 0.7655 | 847_D_−1 |
| 847_C_+1 | — | — | — | — | 0.1502 | 0.5014 | 0.5763 | 847_C_+1 |
| 847_A_2 | — | — | — | — | — | 0.474 | 0.7139 | 847_A_2 |
| 847_A_1 | — | — | — | — | — | — | 1 | 847_A_1 |
| CNTL | 3.6% | 2.9% | 12.8% | 16.5% | 17.8% | 5.4% | 1.3% | CNTL |
| CASE | 3.2% | 2.8% | 17.9% | 21.6% | 24.5% | 7.4% | 0.9% | CASE |

| | 874_R_+1 | 874_S_+1 | 874_T_−1 | 874_V_−1 | |
|---|---|---|---|---|---|
| 874_R_+1 | 0.1597 | 0.4766 | 0.3645 | 0.4563 | 874_R_+1 |
| 874_S_+1 | — | 0.8191 | 0.3188 | 0.6485 | 874_S_+1 |
| 874_T_−1 | — | — | 0.5794 | 0.5573 | 874_T_−1 |
| 874_V_−1 | — | — | — | 0.4743 | 874_V_−1 |
| CNTL | 41.5% | 38.0% | 48.9% | 16.9% | CNTL |
| CASE | 33.3% | 39.5% | 52.6% | 19.8% | CASE |

| | 803_K_3 | 803_K_2 | 803_I_1 | 803_I_−1 | 803_H_+1 | 803_E_+2 | |
|---|---|---|---|---|---|---|---|
| 803_K_3 | 0.3645 | 0.2827 | 0.3971 | 0.5477 | 0.5264 | 0.4218 | 803_K_3 |
| 803_K_2 | — | 0.2083 | 0.5861 | 0.6613 | 0.6176 | 0.2997 | 803_K_2 |
| 803_I_1 | — | — | 0.7033 | 0.753 | 0.6955 | 0.5913 | 803_I_1 |
| 803_I_−1 | — | — | — | 1 | 0.7974 | 0.4821 | 803_I_−1 |
| 803_H_+1 | — | — | — | — | 0.7028 | 0.5103 | 803_H_+1 |
| 803_E_+2 | — | — | — | — | — | 0.3091 | 803_E_+2 |
| CNTL | 1.1% | 0.4% | 28.6% | 0.4% | 25.7% | 42.4% | CNTL |
| CASE | 2.6% | 1.7% | 26.3% | 0.0% | 23.7% | 48.2% | CASE |

| | 962_E_3 | 962_E_+2 | 962_G_4 | 962_G_1 | 962_G_2 | 962_G_6 | 962_H_+2 | 962_M_+2 | 962_P_−2 | 962_Q_−1 | 962_S_−1 | 962_U_1 | |
|---|---|---|---|---|---|---|---|---|---|---|---|---|---|
| 962_E_3 | 0.2974 | 02915 | 0.204 | 0.087 | 0.6881 | 0.2484 | 0.311 | 0.5433 | 0.6727 | 0.6634 | 0.4786 | 0.6045 | 962_E_3 |
| 962_E_+2 | — | 0.1645 | 0.1231 | 0.1181 | 0.158 | 0.082 | 0.2014 | 0.2432 | 0.2642 | 0.2958 | 0.2729 | 0.2645 | 692_E_+2 |
| 962_G_4 | — | — | 0.0904 | [chemical structure] | 0.1929 | [chemical structure] | 0.1096 | 0.2014 | 0.2795 | 0.2753 | 0.1095 | 0.2195 | 962_G_4 |
| 962_G_1 | — | — | — | 0.0695 | 0.3054 | 0.1099 | 0.1424 | 0.1657 | 0.0649 | [chemical structure] | 0.1516 | 0.1315 | 962_G_1 |
| 962_G_2 | — | — | | — | 0.666 | 0.2817 | 0.5762 | 0.5679 | 0.8178 | 0.774 | 0.3131 | 0.6239 | 962_G_2 |
| 962_G_6 | — | | | — | — | 0.1218 | 0.172 | 0.0727 | 0.0853 | 0.0695 | [chemical structure] | 0.1155 | 962_G_6 |
| 962_H_+2 | — | — | | — | — | — | 0.1834 | 0.3028 | 0.4322 | 0.3945 | 0.1222 | 0.4941 | 962_H_+2 |
| 962_M_+2 | — | — | | — | — | — | — | 0.3811 | 0.3722 | 0.3156 | 0.6192 | 0.5613 | 962_M_+2 |
| 962_P_−2 | — | — | | — | — | — | — | — | 0.5173 | 0.33 | 0.3482 | 0.922 | 962_P_−2 |
| 962_Q_−1 | — | — | | — | — | — | — | — | — | 0.4355 | 0.3319 | 0.8763 | 962_Q_−1 |
| 962_S_−1 | — | — | | | — | | — | — | | | 0.2008 | 0.4341 | 962_S_−1 |
| 962_U_1 | — | | | — | — | — | — | — | | — | — | 1 | 962_U_1 |
| 962_U_2 | — | | | | — | — | — | | — | — | — | — | 962_U_2 |
| 962_V_−1 | — | | | — | — | — | — | | — | — | — | — | 962_V_−1 |
| 962_V_+2 | — | | | — | — | — | — | | — | — | | — | 962_V_+2 |
| 962_Z_1 | — | | | — | — | — | — | | — | — | | — | 962_Z_1 |
| CNTL | 36.8% | 12.5%140% | 14.0% | 25.2% | 6.4% | 21.7% | 43.6% | 12.4% | 24.6% | 24.8% | 10.9% | 3.7% | CNTL |
| CASE | 31.0% | 7.4% | 7.8% | 34.4% | 7.6% | 14.4% | 35.8% | 8.6% | 21.2% | 20.7% | 6.7% | 3.4% | CASE |

| | 962_U_2 | 962_V_−1 | 962_V_+2 | 962_Z_1 | |
|---|---|---|---|---|---|
| 962_E_3 | 0.5419 | 0.3712 | 0.5548 | 0.3789 | 962_E_3 |
| 962_E_+2 | 0.2659 | 0.0886 | 0.3613 | 0.3826 | 692_E_+2 |
| 962_G_4 | 0.2152 | 0.3258 | 0.2153 | 0.3197 | 962_G_4 |
| 962_G_1 | 0.1043 | 0.1972 | 0.3573 | 0.2492 | 962_G_1 |
| 962_G_2 | 0.6705 | 0.6619 | 0.5615 | 0.7564 | 962_G_2 |
| 962_G_6 | 0.3091 | 0.1323 | 0.2743 | 0.3044 | 962_G_6 |
| 962_H_+2 | 0.2633 | 0.4808 | 0.2801 | 0.4622 | 962_H_+2 |
| 962_M_+2 | 0.1131 | 0.6542 | 0.3507 | 0.5703 | 962_M_+2 |
| 962_P_−2 | 0.948 | 0.6796 | 0.7363 | 0.7975 | 962_P_−2 |
| 962_Q_−1 | 0.7428 | 0.6208 | 0.8437 | 0.7718 | 962_Q_−1 |
| 962_S_−1 | 0.3126 | 0.5109 | 0.2025 | 0.3561 | 962_S_−1 |
| 962_U_1 | 0.6355 | 0.3439 | 0.8724 | 0.7934 | 962_U_1 |
| 962_U_2 | 0.297 | 0.3151 | 0.7156 | 0.6601 | 962_U_2 |
| 962_V_−1 | — | 0.5516 | 0.7585 | 0.8999 | 962_V_−1 |
| 962_V_+2 | | — | 0.7845 | 0.7238 | 962_V_+2 |
| 962_Z_1 | | — | | 0.4837 | 962_Z_1 |
| CNTL | 25.0% | 34.4% | 4.5% | 30.0% | CNTL |
| CASE | 19.5% | 31.0% | 3.3% | 33.6% | CASE |

[0387] TABLE 31
HAPLOTYPE ANALYSIS OF TOTAL IgE PHENOTYPE US POPULATION

| | 845_R_1 | 845_R_−1 | 845_P_+1 | 845_K_1 | 845_K_−2 | 845_J_1 | 845_J_−1 | 845_H_+1 | 845_H_−1 | 845_G_+1 | 845_F_+1 | 845_D_1 | 845_D_{—1} | 845_D_+1 | |
|---|---|---|---|---|---|---|---|---|---|---|---|---|---|---|---|
| 845_{—} | 0.3763 | [chemical structure] | 0.4291 | 0.2741 | 0.061 | 0.5114 | 0.3395 | 0.6041 | 0.5582 | 0.6003 | 0.5553 | 0.6409 | 0.341 | 0.5721 | 845_R_1 |
| R_1 | | | | | | | | | | | | | | | |
| 845_{—} | — | 0.6371 | 0.3579 | 0.4625 | 0.7658 | 0.7312 | 0.7173 | 0.8947 | 0.5329 | 0.7777 | 0.789 | 0.788 | 0.5082 | 0.698 | 845_R_−1 |
| R_−1 | | | | | | | | | | | | | | | |
| 845_{—} | — | — | 0.1002 | 0.2853 | 0.3643 | 0.3915 | 0.3745 | 0.3972 | 0.4378 | 0.4423 | 0.3215 | 0.4794 | 0.3904 | 0.5397 | 845_P_+1 |
| P_+1 | | | | | | | | | | | | | | | |
| 845_{—} | — | — | — | 1 | 0.6082 | 0.6006 | 0.8939 | 0.8958 | 0.6015 | 0.9926 | 0.454 | 0.8896 | 0.8236 | 0.7791 | 845_K_1 |
| K_1 | | | | | | | | | | | | | | | |
| 845_{—} | — | — | — | — | 0.8075 | 0.7627 | 0.8266 | 0.8464 | 0.3925 | 0.8264 | 0.7076 | 0.8454 | 0.6625 | 0.8512 | 845_K_−2 |
| K_−2 | | | | | | | | | | | | | | | |
| 845_{—} | — | — | — | — | — | 0.6376 | 0.689 | 0.7509 | 0.8291 | 0.7813 | 0.5999 | 0.8772 | 0.6346 | 0.7247 | 845_J_1 |
| J_1 | | | | | | | | | | | | | | | |
| 845_{—} | — | — | — | — | — | — | 1 | 0.9932 | 0.8628 | 0.8851 | 0.7794 | 0.9827 | 0.9724 | 0.9371 | 845_J_−1 |
| J_−1 | | | | | | | | | | | | | | | |
| 845_{—} | — | — | — | — | — | — | — | 1 | 0.8924 | 0.9739 | 0.533 | 0.9293 | 0.9712 | 0.7797 | 845_I_−1 |
| I_−1 | | | | | | | | | | | | | | | |
| 845_{—} | — | — | — | — | — | — | — | — | 1 | 0.8797 | 0.7679 | 0.9337 | 0.6599 | 0.908 | 845_H_+1 |
| H_+1 | | | | | | | | | | | | | | | |
| 845_{—} | — | — | — | — | — | — | — | — | — | 1 | 0.837 | 0.9597 | 0.9746 | 0.9407 | 845_H_−1 |
| H_−1 | | | | | | | | | | | | | | | |
| 845_{—} | | — | — | — | — | — | | — | — | — | 0.7426 | 0.6413 | 0.6061 | 0.4484 | 845_G_+1 |
| G_+1 | | | | | | | | | | | | | | | |
| 845_{—} | | — | — | — | — | — | | — | — | — | — | 1 | 0.9585 | 0.9481 | 845_F_+1 |
| F_+1 | | | | | | | | | | | | | | | |
| 845_{—} | | — | — | — | — | — | — | — | — | — | — | — | 1 | 0.725 | 845_D_1 |
| D_1 | | | | | | | | | | | | | | | |
| 845_{—} | — | — | — | — | — | — | — | — | — | — | — | — | — | 0.7202 | 845_D_−1 |
| D_−1 | | | | | | | | | | | | | | | |
| CNTL | 17.1% | 32.5% | 6.5% | 0.0% | 32.5% | 30.9% | 36.4% | 13.3% | 20.1% | 48.1% | 13.2% | 17.5% | 0.7% | 11.0% | CNTL |
| CASE | 8.3% | 25.0% | 16.7% | 0.0% | 27.3% | 37.5% | 37.5% | 12.5% | 16.7% | 50.0% | 8.3% | 16.7% | 0.0% | 13.6% | CASE |

| | 847_K_1 | 847_J_+1 | 847_E_+1 | 847_D_−1 | 847_C_+1 | 847_A_2 | 847_A_1 | |
|---|---|---|---|---|---|---|---|---|
| 847_K_1 | 0.4387 | 0.6112 | 0.3997 | 0.2007 | 0.3158 | 0.8474 | 0.7237 | 847_K_1 |
| 847_J_+1 | — | 0.6961 | 0.2419 | 0.1401 | 0.3176 | 0.207 | 0.5424 | 847_J_+1 |
| 847_E_+1 | — | — | 0.3158 | 0.1564 | 0.4302 | 0.5092 | 0.2996 | 847_E_+1 |
| 847_D_−1 | — | — | — | 0.1308 | 0.1493 | 0.2724 | 0.1859 | 847_D_−1 |
| 847_C_+1 | — | — | — | — | 0.378 | 0.5464 | 0.3744 | 847_C_+1 |
| 847_A_2 | — | — | — | — | — | 1 | 0.9789 | 847_A_2 |
| 847_A_1 | — | — | — | — | — | — | 1 | 847_A_1 |
| CNTL | 7.3% | 8.4% | 12.3% | 17.6% | 18.2% | 9.1% | 0.7% | CNTL |
| CASE | 11.5% | 3.8% | 3.8% | 4.2% | 8.3% | 7.7% | 0.0% | CASE |

| | 874_R_+1 | 874_S_+1 | 874_T_−1 | 874_V_−1 | |
|---|---|---|---|---|---|
| 874_R_+1 | 0.3317 | 0.4639 | 0.5461 | 0.533 | 874_R_+1 |
| 874_S_+1 | — | 0.8201 | 0.3993 | 0.6175 | 874_S_+1 |
| 874_T_−1 | — | — | 0.3647 | 0.5908 | 874_T_−1 |
| 874_V_−1 | — | — | — | 0.3924 | 874_V_−1 |
| CNTL | 37.0% | 42.2% | 48.1% | 18.8% | CNTL |
| CASE | 25.0% | 45.5% | 36.4% | 27.3% | CASE |

| | 803_K_3 | 803_K_2 | 803_I_1 | 803_I_−1 | 803_H_+1 | 803_E_+2 | |
|---|---|---|---|---|---|---|---|
| 803_K_3 | 1 | 0.7837 | 0.222 | 0.7897 | 0.8098 | 0.2268 | 803_K_3 |
| 803_K_2 | — | 1 | 0.1237 | 1 | 0.9255 | 0.117 | 803_K_2 |
| 803_I_1 | — | — | 0.1714 | 0.1213 | 0.3365 | 0.2921 | 803_I_1 |
| 803_I_−1 | — | — | — | 1 | 0.9248 | 0.11 | 803_I_−1 |
| 803_H_+1 | — | — | — | — | 1 | 0.2773 | 803_H_+1 |
| 803_E_+2 | — | — | — | — | — | 0.1375 | 803_E_+2 |
| CNTL | 0.6% | 0.0% | 27.6% | 0.0% | 24.4% | 47.4% | CNTL |
| CASE | 0.0% | 0.0% | 44.4% | 0.0% | 22.2% | 27.8% | CASE |

| | 962_E_3 | 962_E_+2 | 962_G_4 | 962_G_1 | 962_G_2 | 962_D_6 | 962_H_+2 | 962_M_+2 | 962_P_−2 | 962_Q_−1 | 962_S_−1 | 962_U_1 | |
|---|---|---|---|---|---|---|---|---|---|---|---|---|---|
| 962_E_3 | 0.8172 | 0.2115 | 0.2866 | [chemical structure] | 0.5867 | 0.8474 | 0.1143 | 0.5722 | [chemical structure] | 0.0848 | 0.6602 | 0.2048 | 692_E_3 |
| 962_E_+2 | — | 0.316 | 0.4477 | 0.1729 | 0.5175 | 0.2022 | 0.2203 | 0.3776 | [chemical structure] | [chemical structure] | 0.4254 | 0.3649 | 962_E_+2 |
| 962_G_4 | | — | 0.3133 | 0.0863 | 0.1481 | 0.3626 | 0.32 | 0.3242 | [chemical structure] | [chemical structure] | 0.4093 | 0.2215 | 962_G_4 |
| 962_G_1 | — | — | | 0.1014 | 0.3663 | 0.2943 | 0.1246 | 0.2333 | [chemical structure] | [chemical structure] | 0.2458 | 0.0679 | 962_G_1 |
| 962_G_2 | | — | | — | 1 | 0.9185 | 0.5113 | 0.8406 | [chemical structure] | 0.0728 | 0.9624 | 0.8903 | 962_G_2 |
| 962_G_6 | | | | — | — | 0.4013 | 0.6844 | 0.659 | 0.0884 | 0.0934 | 0.699 | 0.5045 | 962_Q_6 |
| 962_H_+2 | | — | | — | — | — | 0.2614 | 0.2184 | 0.0694 | 0.101 | 0.3392 | 0.3355 | 962_H_+2 |
| 962_M_+2 | | | — | | | — | — | 0.3451 | [chemical structure] | [chemical structure] | 0.4484 | 0.5179 | 962_M_+2 |
| 962_P_−2 | | | | — | | — | — | — | [chemical structure] | [chemical structure] | [chemical structure] | [chemical structure] | 962_P_−2 |
| 962_Q_−1 | | | | | | | | — | | [chemical structure] | 0.0676 | 0.0603 | 962_Q_−1 |
| 962_S_−1 | | | — | | | — | — | — | — | 0.5172 | 0.8519 | 962_S_−1 | |
| 962_U_1 | | — | — | | — | — | — | | — | — | 0.4129 | 962_U_1 | |
| 962_U_2 | | — | — | | | — | — | | — | — | — | 962_U_2 | |
| 962_V_−1 | | | | | — | — | — | | — | — | — | 962_V_−1 | |
| 962_V_+2 | | | — | | | | — | | — | — | — | 962_V_+2 | |
| 962_Z_1 | | | — | | | — | | | — | — | — | 962_Z_1 | |
| CNTL | 33.6% | 13.0% | 12.9% | 30.8% | 9.7% | 17.7% | 37.7% | 13.2% | 22.4% | 21.7% | 12.2% | 1.9% | CNTL |
| CASE | 37.5% | 4.2% | 4.2% | 50.0% | 8.3% | 25.0% | 25.0% | 20.8% | 50.0% | 45.5% | 16.7% | 4.5% | CASE |

| | 962_U_2 | 962_V_−1 | 962_V_+2 | 962_Z_1 | |
|---|---|---|---|---|---|
| 962_E_3 | 0.0641 | 0.5184 | 0.807 | 0.2894 | 692_E_3 |
| 962_E_+2 | [chemical structure] | 0.383 | 0.5794 | 0.1121 | 962_E_+2 |
| 962_G_4 | [chemical structure] | 0.4162 | [chemical structure] | 0.2008 | 962_G_4 |
| 962_G_1 | [chemical structure] | 0.0625 | 0.1196 | 0.1409 | 962_G_1 |
| 962_G_2 | [chemical structure] | 0.6958 | 0.4654 | 0.3824 | 962_G_2 |
| 962_G_6 | 0.093 | 0.0671 | 0.7585 | 0.4835 | 962_Q_6 |
| 962_H_+2 | 0.0822 | 0.074 | 0.5836 | 0.2512 | 962_H_+2 |
| 962_M_+2 | [chemical structure] | 0.6632 | 0.7877 | 0.5007 | 962_M_+2 |
| 962_P_−2 | [chemical structure] | 0.01951 | [chemical structure] | 0.0672 | 962_P_−2 |
| 962_Q_−1 | [chemical structure] | [chemical structure] | [chemical structure] | 0.1148 | 962_Q_−1 |
| 962_S_−1 | [chemical structure] | 0.7916 | 0.8609 | 0.4923 | 962_S_−1 |
| 962_U_1 | [chemical structure] | 0.8537 | 0.8558 | 0.184 | 962_U_1 |
| 962_U_2 | [chemical structure] | [chemical structure] | [chemical structure] | 0.0705 | 962_U_2 |
| 962_V_−1 | — | 0.6278 | 0.1653 | 0.0863 | 962_V_−1 |
| 962_V_+2 | — | | 1 | 0.4925 | 962_V_+2 |
| 962_Z_1 | | | | 0.2483 | 962_Z_1 |
| CNTL | 21.7% | 35.4% | 4.7% | 35.5% | CNTL |
| CASE | 45.8% | 27.3% | 4.2% | 20.8% | CASE |

[0388] All SNP combinations in Tables 29, 30, and 31 that demonstrated a significant difference (p≦0.05) in the distribution of frequencies of the four haplotypes between the cases and the control populations were further analyzed to identify individual haplotypes that were also significant. Table 32 presents the haplotypes that were significantly associated, at the 0.05 level of significance, with the IgE phenotype. Haplotypes with higher allele frequency in the case population than in the control population acted as risk factors that increased the susceptibility to asthma. Haplotypes with lower allele frequencies in the case population than in the control population acted as protective factors that decreased the susceptibility to asthma. For Gene 845, a single susceptibility haplotype G/C (SNPs R1/R−1, p=0.0287) was significant in the US population. For Gene 962, four haplotypes were susceptibility haplotypes in the combined population. They were haplotypes T/A (SNPs E+2/G1, p=0.0163), G/A (SNPs G4/G1, p=0.0096), A/A (SNPs G1/P−2, p=0.0121) and A/A (SNPs G1/Q-1, p=0.0018). Two haplotypes were protective in the combined population. They were C/T (SNPs E+2/V−-1, p=0.0386) and G/A (SNPs G1/Q−1, p=0.0196). Four haplotypes were susceptibility haplotypes in the UK population. They were haplotypes G/A (SNPs G4/G1, p=0.0104), G/C (SNPs G4/G6, p=0.0156), A/A (SNPs G1/Q−1, p=0.041) and C/G (SNPs G6/S−1, p=0.0057). Three haplotypes were protective in the UK population. They were haplotypes G/A (SNPs G1/Q−1, p=0.0138), C/C (SNPs G6/S−1, p=0.0401) and T/G (SNPs G6/S−1, p=0.0255). Six haplotypes were susceptibility haplotypes in the US population. They were G/A (SNPs G4/Q−1, p=0.0096), G/T (SNPs G4/U2, p=0.0086), A/A (SNPs G4N+2, p=0.0305), A/A (SNPs G1/Q−1, p=0.0072), A/T (SNPs G1/U2, p=0.0062) and G/A (SNPs M+2/P−2, p=0.0009). The haplotypes T/G (SNPs E3/G1, p=0.0367) and G/G (SNPs M+2/P−2, p=0.0001) were protective haplotypes in the US population.

TABLE 32

| | | | | | |
|---|---|---|---|---|---|
| | SNP | | | | |
| | COMBI- | HAPLO- | FREQUENCIES | | P- |
| GENE | NATION | TYPE | CNTL | CASE | VALUE |

Total IgE Combined
US and UK

| | | | | | |
|---|---|---|---|---|---|
| 962 | E+2/G1 | TA | 0.237558 | 0.340794 | 0.0163 |
| 962 | E+2/V−1 | CT | 0.049664 | 0 | 0.0386 |
| 962 | G4/G1 | GA | 0.208523 | 0.317136 | 0.0096 |
| 962 | G1/P−2 | AA | 0.057605 | 0.140911 | 0.0121 |
| 962 | G1/Q−1 | AA | 0.049187 | 0.148707 | 0.0018 |
| 962 | G1/Q−1 | GA | 0.187956 | 0.094082 | 0.0196 |

Total IgE
UK Population

| | | | | | |
|---|---|---|---|---|---|
| 962 | G4/G1 | GA | 0.175073 | 0.289291 | 0.0104 |
| 962 | G4/G6 | GC | 0.640687 | 0.77847 | 0.0156 |
| 962 | G1/Q−1 | AA | 0.050665 | 0.116778 | 0.041 |
| 962 | G1/Q−1 | GA | 0.197425 | 0.088239 | 0.0138 |
| 962 | G6/S−1 | CC | 0.101659 | 0.031721 | 0.0401 |
| 962 | G6/S−1 | CG | 0.681786 | 0.821243 | 0.0057 |
| 962 | G6/S−1 | TG | 0.208433 | 0.11209 | 0.0255 |

Total IgE
US Population

| | | | | | |
|---|---|---|---|---|---|
| 845 | R1/R−1 | GC | 0.504855 | 0.75 | 0.0287 |
| 962 | E3/G1 | TG | 0.383347 | 0.125 | 0.0367 |
| 962 | G4/Q−1 | GA | 0.192645 | 0.410714 | 0.0096 |
| 962 | G4/U2 | GT | 0.191643 | 0.416667 | 0.0086 |
| 962 | G4/V+2 | AA | 0 | 0.041667 | 0.0305 |
| 962 | G1/Q−1 | AA | 0.042798 | 0.29779 | 0.0072 |
| 962 | G1/U2 | AT | 0.039558 | 0.286625 | 0.0068 |
| 962 | M+2/P−2 | GG | 0.643053 | 0.263889 | 0.0001 |
| 962 | M+2/P−2 | GA | 0.224358 | 0.527778 | 0.0009 |

[0389] d. Specific IgE

[0390] In Tables 33, 34 and 35, the haplotype analysis (2-at-a-time) is presented for the combined, the UK and the US populations, respectively. Two SNP combinations in Gene 845 are significant in the US population: SNPs R 1 & R−1 (p=0.0227) and SNPs R 1 & K−2 (p=0.0293). A single SNP combination in Gene 847 is significant in the US population: SNPs J+1 & D−1 (p=0.0341). Three SNP combinations in Gene 803 are significant in the US population: SNPs K 2 & I 1 (p=0.0469), SNPs K 2 & I−1 (p=0.0322) and SNPs K 2 & E+2 (p=0.0212). Sixteen SNP combinations in Gene 962 are significant in the combined and in the UK and US population alone: SNPs E 3 & G 1 (US p=0.0281), SNPs G 4 & G 1 (combined p=0.0047, UK p=0.0351), SNPs G 4 & S−1 (combined p=0.0064), SNPs G 4 & U 2 (US p=0.0386), SNPs G 4 & V+2 (US p=0.0366), SNPs G 1 & M+2 (combined p=0.0184, UK p=0.0049), SNPs G 1 & P−2 (combined p=0.0235), SNPs G 1 & Q−1 (combined p=0.0144, US p=0.0265), SNPs G 1 & S−1 (combined p=0.0051, UK p=0.00055), SNPs G 1 & U 2 (combined p=0.0213, US p=0.0256), SNPs G 6 & S−1 (UK p=0.00021), SNPs G 6 & V−1 (UK p=0.0143), SNPs Q−1 & V−1 (US p=0.023), SNPs U1 & Z1 (US p=0.0328), SNPs U 2 & V−1 (US p=0.0239) and SNPs U 2 & V+2 (US p=0.0387).

TABLE 33
HAPLOTYPE ANALYSIS OF SPECIFIC IgE PHENOTYPE COMBINED US/UK POPULATION

| | 845_R_1 | 845_R_−1 | 845_P_+1 | 845_K_1 | 845_K_−2 | 845_J_1 | 845_J_−1 | 845_I_−1 | 845_H_+1 | 845_H_−1 | 845_G_+1 | 845_F_+1 | 845_D_1 | 845_D_−1 | |
|---|---|---|---|---|---|---|---|---|---|---|---|---|---|---|---|
| 845_{—} | 0.2296 | 0.1518 | [chemical structure] | 0.3714 | 0.1807 | 0.1629 | 0.3673 | 0.3834 | 0.1673 | 0.2708 | 0.3605 | 0.3813 | 0.1999 | 0.1281 | 845_R_1 |
| R_1 | | | | | | | | | | | | | | | |
| 845_{—} | — | 0.3572 | [chemical structure] | 0.4822 | 0.3161 | 0.2909 | 0.1797 | 0.6834 | 0.0798 | 0.7266 | 0.7126 | 0.7033 | 0.3785 | 0.1726 | 845_R_−1 |
| R_31 1 | | | | | | | | | | | | | | | |
| 845_{—} | — | — | [chemical structure] | [chemical structure] | [chemical structure] | 0.0745 | 0.0779 | 0.054 | [chemical structure] | 0.0731 | [chemical structure] | [chemical structure] | [chemical structure] | 0.0768 | 845_P_+1 |
| P_+1 | | | | | | | | | | | | | | | |
| 845_{—} | — | — | — | 1 | 0.5052 | 0.1554 | 0.4826 | 0.791 | 0.2566 | 0.5345 | 0.7481 | 0.7973 | 0.7413 | 0.1938 | 845_K_1 |
| K_1 | | | | | | | | | | | | | | | |
| 845_{—} | | — | — | — | 0.4121 | 0.1831 | 0.226 | 0.5452 | 0.0913 | 0.6269 | 0.6766 | 0.6511 | 0.4105 | 0.17 | 845_K_−2 |
| K_−2 | | | | | | | | | | | | | | | |
| 845_{—} | — | — | — | — | — | 0.0856 | 0.1835 | 0.0905 | 0.1172 | 0.329 | 0.0883 | 0.1606 | 0.1449 | 0.106 | 845_J_1 |
| J_1 | | | | | | | | | | | | | | | |
| 845_{—} | — | — | — | — | — | — | 0.391 | 0.5301 | 0.2668 | 0.3866 | 0.5501 | 0.7273 | 0.3249 | 0.1999 | 845_J_−1 |
| J_−1 | | | | | | | | | | | | | | | |
| 845_{—} | — | — | — | — | — | — | — | 0.8746 | 0.2215 | 0.6014 | 0.5279 | 0.7317 | 0.8892 | 0.211 | 845_I_−1 |
| I_−1 | | | | | | | | | | | | | | | |
| 845_{—} | — | — | — | — | — | — | — | — | 0.1414 | 0.1415 | 0.3128 | 0.3392 | 0.1094 | 0.0821 | 845_H_+1 |
| H_+1 | | | | | | | | | | | | | | | |
| 845_{—} | — | — | — | — | — | — | — | — | — | 0.4045 | 0.7055 | 0.7036 | 0.4819 | 0.3251 | 845_H_−1 |
| H_−1 | | | | | | | | | | | | | | | |
| 845_{—} | — | — | — | — | — | — | — | — | — | — | 0.7635 | 0.9483 | 0.8866 | 0.2038 | 845_G_+1 |
| G_+1 | | | | | | | | | | | | | | | |
| 845_{—} | — | — | — | — | — | — | — | — | — | — | — | 0.8944 | 0.9094 | 0.2005 | 845_F_+1 |
| F_+1 | | | | | | | | | | | | | | | |
| 845_{—} | — | — | — | — | — | — | — | — | — | — | — | — | 0.3743 | 0.1541 | 845_D_1 |
| D_1 | | | | | | | | | | | | | | | |
| 845_{—} | — | — | — | — | — | — | — | — | — | — | — | — | — | 0.0931 | 845_D_−1 |
| D_−1 | | | | | | | | | | | | | | | |
| CNTL | 14.8% | 28.7% | 6.5% | 0.2% | 28.9% | 34.5% | 37.1% | 12.8% | 19.6% | 45.2% | 13.2% | 18.4% | 0.2% | 9.9% | CNTL |
| CASE | 10.2% | 24.2% | 14.2% | 0.0% | 24.6% | 43.3% | 32.5% | 11.7% | 13.3% | 40.7% | 14.2% | 19.2% | 0.9% | 15.8% | CASE |

| | 847_K_1 | 847_J_+1 | 847_E_+1 | 847_D_−1 | 847_C_+1 | 847_A_2 | 847_A_1 | |
|---|---|---|---|---|---|---|---|---|
| 847_K_1 | 1 | 0.2108 | 0.5992 | 0.9672 | 0.8047 | 0.4804 | 0.7265 | 847_K_1 |
| 847_J_+1 | — | 0.1282 | 0.1488 | 0.2185 | 0.1525 | 0.188 | 0.198 | 847_J_+1 |
| 847_E_+1 | | — | 0.4567 | 0.5769 | 0.6622 | 0.8442 | 0.7965 | 847_E_+1 |
| 847_D_−1 | | — | | 0.8861 | 0.8465 | 0.9751 | 0.943 | 847_D_−1 |
| 847_C_+1 | — | — | — | — | 0.4345 | 0.801 | 0.7925 | 847_C_+1 |
| 847_A_2 | — | — | — | — | — | 0.6925 | 0.833 | 847_A_2 |
| 847_A_1 | — | — | — | — | — | — | 1 | 847_A_1 |
| CNTL | 4.9% | 4.9% | 12.6% | 16.9% | 17.9% | 6.7% | 1.0% | CNTL |
| CASE | 4.3% | 1.6% | 15.1% | 17.6% | 21.4% | 7.8% | 0.8% | CASE |

| | 874_R_+1 | 874_S_+1 | 874_T_−1 | 874_V_−1 | |
|---|---|---|---|---|---|
| 874_R_+1 | 0.1645 | 0.52 | 0.4011 | 0.5423 | 874_R_+1 |
| 874_S_+1 | | 0.7578 | 0.4091 | 0.7481 | 874_S_+1 |
| 874_T_−1 | — | — | 0.9204 | 0.8202 | 874_T_−1 |
| 874_V_−1 | | — | — | 0.7951 | 874_V_−1 |
| CNTL | 39.9% | 39.5% | 48.6% | 17.6% | CNTL |
| CASE | 32.5% | 41.4% | 49.2% | 18.5% | CASE |

| | 803_K_3 | 803_K_2 | 803_I_1 | 803_I_−1 | 803_H_+1 | 803_E_+2 | |
|---|---|---|---|---|---|---|---|
| 803_K_3 | 1 | 0.4344 | 0.9062 | 0.9978 | 0.969 | 0.9789 | 803_K_3 |
| 803_K_2 | — | 0.1402 | 0.3256 | 0.3166 | 0.3845 | 0.3316 | 803_K_2 |
| 803_I_1 | — | — | 0.9108 | 0.8981 | 0.9528 | 0.8027 | 803_I_1 |
| 803_I_−1 | — | — | — | 1 | 0.9445 | 0.9941 | 803_I_−1 |
| 803_H_+1 | — | — | — | — | 0.9094 | 0.8957 | 803_H_+1 |
| 803_E_+2 | — | — | | — | — | 1 | 803_E_+2 |
| CNTL | 0.9% | 0.2% | 28.2% | 0.2% | 25.2% | 44.2% | CNTL |
| CASE | 0.7% | 1.5% | 27.3% | 0.0% | 25.8% | 44.6% | CASE |

| | 962_E_3 | 962_E_+2 | 962_G_4 | 962_G_1 | 962_G_2 | 962_G_6 | 962_H_+2 | 962_M_+2 | 962_P_−2 | 962_Q_−1 | 962_S_−1 | 962_U_1 | |
|---|---|---|---|---|---|---|---|---|---|---|---|---|---|
| 962_E_3 | 0.6744 | 0.4225 | 0.3457 | 0.1286 | 0.4144 | 0.7862 | 0.3675 | 0.112 | 0.7783 | 0.7556 | [chemical structure] | 0.8311 | 962_E_3 |
| 962_E_+2 | — | 0.2273 | 0.1035 | 0.0705 | 0.6363 | 0.5865 | 0.3159 | 0.0889 | 0.2515 | 0.2958 | [chemical structure] | 0.4087 | 962_E_+2 |
| 962_G_4 | — | — | 0.0891 | [chemical structure] | 0.2229 | 0.2633 | 0.2078 | [chemical structure] | 0.2325 | 0.2413 | [chemical structure] | 0.1943 | 962_G_4 |
| 962_G_1 | — | — | — | [chemical structure] | 0.1604 | 0.0767 | 0.0529 | [chemical structure] | [chemical structure] | [chemical structure] | [chemical structure] | 0.0854 | 962_G_1 |
| 962_G_2 | — | — | — | — | 0.8546 | 0.9507 | 0.5882 | 0.1948 | 0.7999 | 0.8257 | [chemical structure] | 0.1274 | 962_G_2 |
| 962_G_6 | — | — | — | — | — | 0.6158 | 0.5057 | 0.1446 | 0.6043 | 0.6193 | [chemical structure] | 0.1287 | 962_G_6 |
| 962_H_+2 | — | — | — | — | — | — | 0.2288 | 0.0722 | 0.4866 | 0.4064 | [chemical structure] | 0.5704 | 962_H_+2 |
| 962_M_+2 | — | — | — | — | — | — | — | [chemical structure] | 0.0925 | 0.1035 | [chemical structure] | 0.0938 | 962_M_+2 |
| 962_P_−2 | — | — | — | — | — | — | — | — | 0.3568 | 0.8098 | [chemical structure] | 0.6846 | 962_P_−2 |
| 962_Q_−1 | — | — | — | — | — | — | — | — | — | 0.3505 | [chemical structure] | 0.6508 | 962_Q_−1 |
| 962_S_−1 | — | — | — | — | — | — | — | — | — | — | [chemical structure] | [chemical structure] | 962_S_−1 |
| 962_U_1 | — | — | — | — | — | — | — | — | — | — | — | 0.4086 | 962_U_1 |
| 962_U_2 | — | — | | | — | — | — | — | — | — | — | — | 962_U_2 |
| 962_V_−1 | — | — | — | | — | — | — | — | — | — | — | — | 962_V_−1 |
| 962_V_+2 | — | — | — | — | — | — | — | — | — | — | — | — | 962_V_+2 |
| 962_Z_1 | — | — | — | — | — | — | — | — | — | — | — | — | 962_Z_1 |
| CNTL | 35.6% | 12.7% | 13.6% | 27.2% | 7.6% | 20.4% | 41.5% | 12.7% | 23.8% | 23.7% | 11.4% | 3.0% | CNTL |
| CASE | 33.1% | 8.7% | 7.7% | 37.7% | 8.1% | 18.2% | 35.3% | 6.2% | 28.0% | 28.1% | 3.7% | 4.6% | CASE |

| | 962_U_2 | 962_V_−1 | 962_V_+2 | 962_Z_1 | |
|---|---|---|---|---|---|
| 962_E_3 | 0.9381 | 0.2573 | 0.7005 | 0.7193 | 962_E_3 |
| 962_E_+2 | 0.419 | 0.3405 | 0.4616 | 0.4665 | 962_E_+2 |
| 962_G_4 | 0.3096 | 0.262 | 0.335 | 0.1846 | 962_G_4 |
| 962_G_1 | [chemical structure] | 0.0946 | 0.1697 | 0.1218 | 962_G_1 |
| 962_G_2 | 0.9647 | 0.8981 | 0.9379 | 0.8667 | 962_G_2 |
| 962_G_6 | 0.9029 | 0.539 | 0.523 | 0.7072 | 962_G_6 |
| 962_H_+2 | 0.3779 | 0.1938 | 0.3487 | 0.4438 | 962_H_+2 |
| 962_M_+2 | 0.112 | 0.1275 | 0.0974 | 0.1731 | 962_M_+2 |
| 962_P_−2 | 0.3626 | 0.8466 | 0.6076 | 0.4826 | 962_P_−2 |
| 962_Q_−1 | 0.6619 | 0.6842 | 0.7026 | 0.553 | 962_Q_−1 |
| 962_S_−1 | [chemical structure] | [chemical structure] | [chemical structure] | 962_{—} | |
| | | | | S_−1 | |
| 962_U_1 | 0.8632 | 0.5495 | 0.6703 | 0.343 | 962_U_1 |
| 962_U_2 | 0.7291 | 0.7724 | 0.8708 | 0.7266 | 962_U_2 |
| 962_V_−1 | — | 0.456 | 0.8624 | 0.6423 | 962_V_−1 |
| 962_V_+2 | — | — | 0.8108 | 0.6306 | 962_V_+2 |
| 962_Z_1 | — | | — | 0.4601 | 962_Z_1 |
| CNTL | 23.8% | 34.8% | 4.5% | 31.9% | CNTL |
| CASE | 25.4% | 31.1% | 3.7% | 28.3% | CASE |

[0391] TABLE 34
HAPLOTYPE ANALYSIS OF SPECIFIC IgE PHENOTYPE UK POPULATION

| | 845_R_1 | 845_R_−1 | 845_P_+1 | 845_K_1 | 845_K_−2 | 845_J_1 | 845_J_−1 | | |
|---|---|---|---|---|---|---|---|---|---|
| 845_R_1 | 0.7179 | 0.6166 | 0.2644 | 0.7802 | 0.6552 | 0.5648 | 0.7964 | 845_R_1 | |
| 845_R_−1 | — | 0.4875 | 0.2588 | 0.6508 | 0.6762 | 0.5075 | 0.4611 | 845_R_−1 | |
| 845_P_+1 | | | 0.0724 | 0.2294 | 0.27 | 0.3931 | 0.2586 | 845_P_+1 | |
| 845_K_1 | | — | — | 1 | 0.6585 | 0.4304 | 0.6677 | 845_K_1 | |
| 845_K_−2 | | | | — | 0.5747 | 0.4925 | 0.5387 | 845_K_−2 | |
| 845_J_1 | | | | | — | 0.3119 | 0.5036 | 845_J_1 | |
| 845_J_−1 | | | — | — | — | — | 0.6131 | 845_J_−1 | |
| 845_I_−1 | — | — | — | — | — | — | — | 845_I_−1 | |
| 845_H_+1 | | — | — | — | — | — | — | 845_H_+1 | |
| 845_H_−1 | | — | — | — | — | — | — | 845_H_−1 | |
| 845_G_+1 | — | — | — | — | — | — | — | 845_G_+1 | |
| 845_F_+1 | — | — | — | — | — | — | — | 845_F_+1 | |
| 845_D_1 | — | | — | — | — | — | — | 845_D_1 | |
| 845_D_−1 | — | | — | — | — | — | — | 845_D_−1 | |
| CNTL | 13.6% | 26.6% | 6.4% | 0.4% | 27.0% | 36.6% | 37.5% | CNTL | |
| CASE | 11.6% | 22.7% | 12.5% | 0.0% | 23.3% | 43.2% | 34.1% | CASE | |
| | 845_I_−1 | 845_H_+1 | 845_H_−1 | 845_G_+1 | 845_F_+1 | 845_D_1 | 845_D_−1 | | |
| 845_R_1 | 0.8368 | 0.3811 | 0.6567 | 0.5634 | 0.5657 | 0.1807 | 0.3181 | 845_R_1 | |
| 845_R_−1 | 0.675 | 0.2615 | 0.7534 | 0.6647 | 0.7616 | 0.1752 | 0.3296 | 845_R_−1 | |
| 845_P_+1 | 0.2596 | 0.1602 | 0.348 | 0.2028 | 0.2206 | 0.0811 | 0.2774 | 845_P_+1 | |
| 845_K_1 | 0.8109 | 0.425 | 0.5828 | 0.5418 | 0.7533 | 0.1398 | 0.3064 | 845_K_1 | |
| 845_K_−2 | 0.7254 | 0.2937 | 0.7282 | 0.7126 | 0.7917 | 0.1835 | 0.3029 | 845_K_−2 | |
| 845_J_1 | 0.3359 | 0.3591 | 0.7922 | 0.3446 | 0.5693 | 0.132 | 0.3158 | 845_J_1 | |
| 845_J_−1 | 0.7402 | 0.4496 | 0.6547 | 0.5778 | 0.9237 | 0.1777 | 0.3385 | 845_J_−1 | |
| 845_I_−1 | 0.852 | 0.3828 | 0.6398 | 0.2937 | 0.7773 | 0.2669 | 0.3774 | 845_I_−1 | |
| 845_H_+1 | — | 0.2667 | 0.2899 | 0.4678 | 0.5499 | 0.0519 | 0.192 | 845_H_+1 | |
| 845_H_−1 | — | — | 0.459 | 0.6689 | 0.7392 | 0.1676 | 0.1996 | 845_H_−1 | |
| 845_G_+1 | — | — | — | 0.5956 | 0.7324 | 0.1832 | 0.2585 | 845_G_+1 | |
| 845_F_+1 | — | — | — | — | 0.757 | 0.2616 | 0.2757 | 845_F_+1 | |
| 845_D_1 | — | — | — | — | — | 0.235 | 0.0739 | 845_D_1 | |
| 845_D_−1 | — | — | — | — | — | — | 0.1601 | 845_D_−1 | |
| CNTL | 12.6% | 19.3% | 43.6% | 13.2% | 18.8% | 0.0% | 9.3% | CNTL | |
| CASE | 11.4% | 13.6% | 38.6% | 15.9% | 20.5% | 1.2% | 15.1% | CASE | |
| | 847_K_1 | 847_J_+1 | 847_E_+1 | 847_D_−1 | 847_C_+1 | 847_A_2 | 847_A_1 | | |
| 847_K_1 | 1 | 0.556 | 0.33 | 0.5504 | 0.3852 | 0.446 | 0.9021 | 847_K_1 | |
| 847_J_+1 | — | 0.461 | 0.2494 | 0.28 | 0.1971 | 0.6781 | 0.6582 | 847_J_+1 | |
| 847_E_+1 | — | — | 0.1653 | 0.1659 | 0.2652 | 0.4232 | 0.4364 | 847_E_+1 | |
| 847_D_−1 | | — | — | 0.1853 | 0.1276 | 0.5154 | 0.7086 | 847_D_−1 | |
| 847_C_+1 | — | — | — | — | 0.0964 | 0.272 | 0.33 | 847_C_+1 | |
| 847_A_2 | — | — | — | — | — | 0.6132 | 0.8312 | 847_A_2 | |
| 847_A_1 | — | — | — | — | — | — | 1 | 847_A_1 | |
| CNTL | 3.6% | 2.9% | 12.8% | 16.5% | 17.8% | 5.4% | 1.3% | CNTL | |
| CASE | 2.5% | 1.1% | 18.9% | 23.1% | 26.1% | 6.5% | 1.1% | CASE | |
| | 874_R_+1 | 874_S_+1 | 874_T_−1 | 874_V_−1 | | | | | |
| 874_R_+1 | 0.1412 | 0.332 | 0.2742 | 0.4802 | 874_R_+1 | | | | |
| 874_S_+1 | — | 0.7215 | 0.4266 | 0.8159 | 874_S_+1 | | | | |
| 874_T_−1 | | — | 0.7309 | 0.8326 | 874_T_−1 | | | | |
| 874_V_−1 | — | — | — | 0.7623 | 874_V_−1 | | | | |
| CNTL | 41.5% | 38.0% | 48.9% | 16.9% | CNTL | | | | |
| CASE | 32.3% | 40.2% | 51.0% | 18.3% | CASE | | | | |
| | 803_K_3 | 803_K_2 | 803_I_1 | 803_I_−1 | 803_H_+1 | 803_E_+2 | | | |
| 803_K_3 | 1 | 0.9362 | 0.6485 | 0.9952 | 0.9915 | 0.8117 | 803_K_3 | | |
| 803_K_2 | — | 0.4764 | 0.7517 | 0.993 | 0.5925 | 0.7175 | 803_K_2 | | |
| 803_I_1 | — | — | 0.4281 | 0.5416 | 0.5808 | 0.5877 | 803_I_1 | | |
| 803_I_−1 | — | — | — | 1 | 0.9705 | 0.4939 | 803_I_−1 | | |
| 803_H_+1 | — | — | — | — | 1 | 0.4115 | 803_H_+1 | | |
| 803_E_+2 | | — | — | — | — | 0.3491 | 803_E_+2 | | |
| CNTL | 1.1% | 0.4% | 28.6% | 0.4% | 25.7% | 42.4% | CNTL | | |
| CASE | 0.9% | 0.9% | 24.0% | 0.0% | 26.0% | 48.0% | CASE | | |
| | 962_E_3 | 962_E_+2 | 962_G_4 | 962_G_1 | 962_G_2 | 962_G_6 | 962_H_+2 | 962_M_+2 | |
| 962_E_3 | 0.2697 | 0.4471 | 0.2848 | 0.1582 | 0.5166 | 0.2632 | 0.3556 | [chemical structure] | 962_E_3 |
| 962_E_+2 | | 0.3692 | 0.1179 | 0.1643 | 0.5854 | 0.1661 | 0.4283 | [chemical structure] | 962_E_+2 |
| 962_G_4 | — | — | 0.1539 | [chemical structure] | 0.2729 | 0.098 | 0.3311 | [chemical structure] | 962_G_4 |
| 962_G_1 | | — | — | 0.0742 | 0.2966 | 0.0975 | 0.1596 | [chemical structure] | 962_G_1 |
| 962_G_2 | — | — | — | — | 0.5009 | 0.4053 | 0.4236 | [chemical structure] | 962_G_2 |
| 962_G_6 | — | — | — | — | — | 0.1841 | 0.1991 | [chemical structure] | 962_G_6 |
| 962_H_+2 | — | — | — | — | — | — | 0.2445 | [chemical structure] | 962_H_+2 |
| 962_M_+2 | — | — | — | — | — | — | — | [chemical structure] | 962_M_+2 |
| 962_P_−2 | — | — | — | — | — | — | — | — | 962_P_−2 |
| 962_Q_−1 | — | — | — | — | — | — | — | — | 962_Q_−1 |
| 962_S_−1 | — | — | — | — | — | — | — | — | 962_S_−1 |
| 962_U_1 | — | — | — | — | — | — | — | — | 962_U_1 |
| 962_U_2 | — | — | — | | — | — | — | — | 962_U_2 |
| 962_V_−1 | — | — | — | — | — | — | — | — | 962_V_−1 |
| 962_V_+2 | — | | | — | — | — | — | — | 962_V_+2 |
| 962_Z_1 | | — | — | — | — | — | — | — | 962_Z_1 |
| CNTL | 36.8% | 12.5% | 14.0% | 25.2% | 6.4% | 21.7% | 43.6% | 12.4% | CNTL |
| CASE | 30.0% | 8.5% | 8.2% | 34.9% | 8.7% | 15.0% | 36.5% | 3.0% | CASE |
| | 962_P_−2 | 962_Q_−1 | 962_S_−1 | 962_U_1 | 962_U_2 | 962_V_−1 | 962_V_+2 | 962_Z_1 | |
| 962_E_3 | 0.7001 | 0.7038 | [chemical structure] | 0.3907 | 0.5306 | 0.1475 | 0.7456 | 0.5462 | 962_E_3 |
| 962_E_+2 | 0.2666 | 0.3534 | [chemical structure] | 0.4799 | 0.2426 | 0.1067 | 0.5848 | 0.6605 | 962_E_+2 |
| 962_G_4 | 0.4604 | 0.484 | [chemical structure] | 0.3027 | 0.366 | 0.3921 | 0.297 | 0.3495 | 962_G_4 |
| 962_G_1 | 0.1284 | 0.1732 | [chemical structure] | 0.0626 | 0.1182 | 0.1849 | 0.2897 | 0.3231 | 962_G_1 |
| 962_G_2 | 0.9134 | 0.8569 | [chemical structure] | 0.1854 | 0.766 | 0.5967 | 0.8865 | 0.8829 | 962_G_2 |
| 962_G_6 | 0.135 | 0.1258 | [chemical structure] | 0.0962 | 0.2368 | [chemical structure] | 0.2299 | 0.4163 | 962_G_6 |
| 962_H_+2 | 0.5986 | 0.6454 | [chemical structure] | 0.5194 | 0.4206 | 0.4917 | 0.3688 | 0.6572 | 962_H_+2 |
| 962_M_+2 | [chemical structure] | [chemical structure] | [chemical structure] | [chemical structure] | [chemical structure] | [chemical structure] | [chemical structure] | [chemical structure] | 962_M_+2 |
| 962_P_−2 | 1 | 0.9998 | [chemical structure] | 0.9493 | 0.6173 | 0.7626 | 0.9745 | 0.9291 | 962_P_−2 |
| 962_Q_−1 | — | 1 | [chemical structure] | 0.9707 | 0.7799 | 0.7163 | 0.9784 | 0.9584 | 962_Q_−1 |
| 962_S_−1 | — | — | [chemical structure] | [chemical structure] | [chemical structure] | [chemical structure] | [chemical structure] | [chemical structure] | 962_S_−1 |
| 962_U_1 | — | — | — | 0.5642 | 0.8007 | 0.4202 | 0.8658 | 0.729 | 962_U_1 |
| 962_U_2 | — | — | — | — | 0.4151 | 0.3504 | 0.8659 | 0.8125 | 962_U_2 |
| 962_V_−1 | — | — | — | — | — | 0.3829 | 0.6388 | 0.7466 | 962_V_−1 |
| 962_V_+2 | — | — | — | — | — | — | 1 | 0.8919 | 962_V_+2 |
| 962_Z_1 | — | — | — | — | — | — | — | 0.7114 | 962_Z_1 |
| CNTL | 24.6% | 24.8% | 10.9% | 3.7% | 25.0% | 34.4% | 4.5% | 30.0% | CNTL |
| CASE | 24.0% | 24.5% | 1.0% | 4.9% | 20.6% | 29.4% | 3.8% | 32.1% | CASE |

[0392] TABLE 35
HAPLOTYPE ANALYSIS OF SPECIFIC IgE PHENOTYPE US POPULATION

| | 845_R_1 | 845_R_−1 | 845_P_+1 | 845_K_1 | 845_K_−2 | 845_J_1 | 845_J_−1 | | |
|---|---|---|---|---|---|---|---|---|---|
| 845_R_1 | 0.175 | [chemical structure] | 0.097 | 0.0804 | [chemical structure] | 0.1689 | 0.2609 | 845_R_1 | |
| 845_R_−1 | | 0.6822 | 0.1594 | 0.6501 | 0.9435 | 0.4122 | 0.3452 | 845_R_−1 | |
| 845_P_+1 | — | — | [chemical structure] | 0.0909 | 0.1551 | 0.1498 | 0.1668 | 845_P_+1 | |
| 845_K_1 | — | — | — | 1 | 0.6613 | 0.1843 | 0.358 | 845_K_1 | |
| 845_K_−2 | | — | — | — | 0.8264 | 0.3347 | 0.4297 | 845_K_−2 | |
| 845_J_1 | — | — | — | — | — | 0.2144 | 0.3497 | 845_J_1 | |
| 845_J_−1 | | — | — | — | | — | 0.4212 | 845_J_−1 | |
| 845_I_−1 | | — | — | — | — | — | — | 845_I_−1 | |
| 845_H_+1 | | — | — | — | — | — | — | 845_H_+1 | |
| 845_H_−1 | | — | — | — | — | — | — | 845_H_−1 | |
| 845_G_+1 | — | — | — | — | — | — | — | 845_G_+1 | |
| 845_F_+1 | | — | — | — | — | — | — | 845_F_+1 | |
| 845_D_1 | | — | — | — | — | — | — | 845_D_1 | |
| 845_D_−1 | — | — | — | — | — | — | — | 845_D_−1 | |
| CNTL | 17.1% | 32.5% | 6.5% | 0.0% | 32.5% | 30.9% | 36.4% | CNTL | |
| CASE | 6.3% | 28.1% | 18.8% | 0.0% | 28.6% | 43.8% | 28.1% | CASE | |
| | 845_I_−1 | 845_H_+1 | 845_H_−1 | 845_G_+1 | 845_F_+1 | 845_D_1 | 845_D_−1 | | |
| 845_R_1 | 0.2989 | 0.4563 | 0.1511 | 0.3264 | 0.3726 | 0.2774 | 0.2491 | 845_R_1 | |
| 845_R_−1 | 0.9851 | 0.3784 | 0.8511 | 0.7938 | 0.9446 | 0.7015 | 0.6007 | 845_R_−1 | |
| 845_P_+1 | 0.197 | 0.1484 | 0.2216 | 0.1837 | 0.2313 | 0.1372 | 0.1265 | 845_P_+1 | |
| 845_K_1 | 0.9047 | 0.2098 | 0.8964 | 0.506 | 0.7327 | 0.9344 | 0.3654 | 845_K_1 | |
| 845_K_−2 | 0.6989 | 0.2679 | 0.9696 | 0.5982 | 0.8598 | 0.7101 | 0.6064 | 845_K_−2 | |
| 845_J_1 | 0.3023 | 0.3171 | 0.2419 | 0.3491 | 0.4717 | 0.3253 | 0.3068 | 845_J_1 | |
| 845_J_−1 | 0.6395 | 0.5232 | 0.6157 | 0.5865 | 0.7769 | 0.4739 | 0.549 | 845_J_−1 | |
| 845_I_−1 | 1 | 0.6081 | 0.9805 | 0.7185 | 0.816 | 0.9895 | 0.6621 | 845_I_−1 | |
| 845_H_+1 | — | 0.4562 | 0.4663 | 0.5249 | 0.7149 | 0.4445 | 0.4594 | 845_H_+1 | |
| 845_H_−1 | — | — | 1 | 0.8316 | 0.9391 | 0.9825 | 0.6571 | 845_H_−1 | |
| 845_G_+1 | — | — | — | 0.7705 | 0.8159 | 0.6574 | 0.5856 | 845_G_+1 | |
| 845_F_+1 | — | — | — | — | 1 | 0.9598 | 0.6606 | 845_F_+1 | |
| 845_D_1 | — | — | — | — | — | 1 | 0.4301 | 845_D_1 | |
| 845_D_−1 | — | — | — | — | — | — | 0.3432 | 845_D_−1 | |
| CNTL | 13.3% | 20.1% | 48.1% | 13.2% | 17.5% | 0.7% | 11.0% | CNTL | |
| CASE | 12.5% | 12.5% | 46.7% | 9.4% | 15.6% | 0.0% | 17.9% | CASE | |
| | 847_K_1 | 847_J_+1 | 847_E_+1 | 847_D_−1 | 847_C_+1 | 847_A_2 | 847_A_1 | | |
| 847_K_1 | 0.7364 | 0.5688 | 0.5756 | 0.1052 | 0.2831 | 0.9369 | 0.9841 | 847_K_1 | |
| 847_J_+1 | | 0.4757 | 0.1843 | [chemical structure] | 0.1836 | 0.1681 | 0.3925 | 847_J_+1 | |
| 847_E_+1 | | — | 0.3765 | 0.1293 | 0.3792 | 0.593 | 0.3756 | 847_E_+1 | |
| 847_D_−1 | — | — | — | 0.0516 | 0.1028 | 0.1118 | 0.0505 | 847_D_−1 | |
| 847_C_+1 | — | — | — | — | 0.2134 | 0.5643 | 0.3653 | 847_C_+1 | |
| 847_A_2 | — | — | — | — | — | 0.7523 | 0.8675 | 847_A_2 | |
| 847_A_1 | — | — | — | — | — | — | 1 | 847_A_1 | |
| CNTL | 7.3% | 8.4% | 12.3% | 17.6% | 18.2% | 9.1% | 0.7% | CNTL | |
| CASE | 8.3% | 2.8% | 5.6% | 3.3% | 8.8% | 11.1% | 0.0% | CASE | |
| | 874_R_+1 | 874_S_+1 | 874_T_−1 | 874_V_−1 | | | | | |
| 874_R_+1 | 0.8215 | 0.6966 | 0.9496 | 0.8969 | 874_R_+1 | | | | |
| 874_S_+1 | — | 0.8308 | 0.7872 | 0.9389 | 874_S_+1 | | | | |
| 874_T_−1 | — | — | 0.6733 | 0.8809 | 874_T_−1 | | | | |
| 874_V_−1 | | — | — | 1 | 874_V_−1 | | | | |
| CNTL | 37.0% | 42.2% | 48.1% | 18.8% | CNTL | | | | |
| CASE | 33.3% | 46.2% | 42.3% | 19.2% | CASE | | | | |
| | 803_K_3 | 803_K_2 | 803_I_1 | 803_I_−1 | 803_H_+1 | 803_E_+2 | | | |
| 803_K_3 | 1 | 0.2217 | 0.3284 | 0.7941 | 0.8564 | 0.2885 | 803_K_3 | | |
| 803_K_2 | — | 0.1522 | [chemical structure] | [chemical structure] | 0.2229 | [chemical structure] | 803_K_2 | | |
| 803_I_1 | — | — | 0.2596 | 0.2116 | 0.3967 | 0.3811 | 803_I_1 | | |
| 803_I_−1 | — | — | — | 1 | 0.9655 | 0.136 | 803_I_−1 | | |
| 803_H_+1 | — | — | — | — | 1 | 0.3741 | 803_H_+1 | | |
| 803_E_+2 | — | — | — | — | — | 0.1529 | 803_E_+2 | | |
| CNTL | 0.6% | 0.0% | 27.6% | 0.0% | 24.4% | 47.4% | CNTL | | |
| CASE | 0.0% | 3.6% | 39.3% | 0.0% | 25.0% | 32.1% | CASE | | |
| | 962_E_3 | 962_E_+2 | 962_G_4 | 962_G_1 | 962_G_2 | 962_G_6 | 962_H_+2 | 962_M_+2 | |
| 962_E_3 | 0.305 | 0.2406 | 0.2585 | [chemical structure] | 0.2389 | 0.3664 | 0.3253 | 0.6097 | 962_E_3 |
| 962_E_+2 | — | 0.7706 | 0.7148 | 0.26 | 0.6897 | 0.0917 | 0.2222 | 0.8358 | 962_E_+2 |
| 962_G_4 | — | — | 0.3748 | 0.1121 | 0.3078 | 0.2144 | 0.6699 | 0.389 | 962_G_4 |
| 962_G_1 | | — | — | 0.0999 | 0.3587 | 0.2778 | 0.2425 | 0.3823 | 962_G_1 |
| 962_G_2 | — | — | — | — | 0.7414 | 0.6277 | 0.6815 | 0.8657 | 962_G_2 |
| 962_G_6 | — | — | — | — | — | 0.216 | 0.6615 | 0.6239 | 962_G_6 |
| 962_H_+2 | — | — | — | — | — | — | 0.5501 | 0.3982 | 962_H_+2 |
| 962_M_+2 | — | — | — | — | — | — | — | 0.5704 | 962_M_+2 |
| 962_P_−2 | — | — | — | — | — | — | — | — | 962_P_−2 |
| 962_Q_−1 | — | — | — | — | — | — | — | — | 962_Q_−1 |
| 962_S_−1 | — | — | — | — | — | — | — | — | 962_S_−1 |
| 962_U_1 | — | — | — | — | — | — | — | — | 962_U_1 |
| 962_U_2 | — | — | — | — | — | — | — | — | 962_U_2 |
| 962_V_−1 | | — | — | — | — | — | — | — | 962_V_−1 |
| 962_V_+2 | | — | — | — | — | — | — | — | 962_V_+2 |
| 962_Z_1 | — | — | — | — | — | — | — | — | 962_Z_1 |
| CNTL | 33.6% | 13.0% | 12.9% | 30.8% | 9.7% | 17.7% | 37.7% | 13.2% | CNTL |
| CASE | 43.3% | 9.4% | 6.3% | 46.9% | 6.3% | 28.1% | 31.3% | 16.7% | CASE |
| | 962_P_−2 | 962_Q_−1 | 962_S_−1 | 962_U_1 | 962_U_2 | 962_V_−1 | 962_V_+2 | 962_Z_1 | |
| 962_E_3 | 0.0714 | 0.121 | 0.7172 | 0.1596 | 0.0999 | 0.7343 | 0.5741 | 0.0682 | 962_E_3 |
| 962_E_+2 | 0.0908 | 0.1311 | 0.8874 | 0.8644 | 0.0896 | 0.8613 | 0.7766 | 0.1191 | 962_E_+2 |
| 962_G_4 | [chemical structure] | [chemical structure] | 0.4842 | 0.4509 | [chemical structure] | 0.7467 | [chemical structure] | 0.0531 | 962_G_4 |
| 962_G_1 | 0.0616 | [chemical structure] | 0.398 | 0.1067 | [chemical structure] | 0.4599 | 0.1584 | [chemical structure] | 962_G_1 |
| 962_G_2 | 0.0905 | 0.1021 | 0.8738 | 0.7868 | 0.0725 | 0.6338 | 0.2843 | 0.1006 | 962_G_2 |
| 962_G_6 | 0.117 | 0.1176 | 0.6019 | 0.4484 | 0.1235 | 0.3756 | 0.5743 | 0.1 | 962_G_6 |
| 962_H_+2 | 0.2436 | 0.1996 | 0.4288 | 0.6756 | 0.1596 | 0.1278 | 0.7467 | 0.0525 | 962_H_+2 |
| 962_M_+2 | 0.0637 | 0.1021 | 0.5669 | 0.8508 | 0.0878 | 0.9423 | 0.8599 | 0.2111 | 962_M_+2 |
| 962_P_−2 | [chemical structure] | 0.0791 | 0.1051 | 0.1038 | 0.0869 | 0.0677 | 0.0677 | 0.0514 | 962_P_−2 |
| 962_Q_−1 | — | [chemical structure] | 0.1482 | 0.1022 | [chemical structure] | [chemical structure] | [chemical structure] | 0.0558 | 962_Q_−1 |
| 962_S_−1 | — | — | 1 | 0.9234 | 0.1333 | 0.9917 | 0.9384 | 0.22 | 962_S_−1 |
| 962_U_1 | — | — | — | 0.4864 | 0.0912 | 0.9104 | 0.8463 | [chemical structure] | 962_U_1 |
| 962_U_2 | — | — | — | — | [chemical structure] | [chemical structure] | [chemical structure] | [chemical structure] | 962_U_2 |
| 962_V_−1 | — | — | — | — | — | 1 | 0.1642 | 0.0526 | 962_V_−1 |
| 962_V_+2 | — | — | — | — | — | — | 1 | 0.0525 | 962_V_+2 |
| 962_Z_1 | — | — | — | — | — | — | — | [chemical structure] | 962_Z_1 |
| CNTL | 22.4% | 21.7% | 12.2% | 1.9% | 21.7% | 35.4% | 4.7% | 35.5% | CNTL |
| CASE | 42.9% | 40.0% | 12.5% | 3.6% | 40.6% | 36.7% | 3.1% | 15.6% | CASE |

[0393] All SNP combinations in Tables 33, 34, and 35 that demonstrated a significant difference (p≦0.05) in the distribution of frequencies of the four haplotypes between the cases and the control populations were further analyzed to identify individual haplotypes that were also significant. Table 36 presents the haplotypes that were significantly associated, at the 0.05 level of significance, with the Specific IgE phenotype. Haplotypes with higher allele frequency in the case population than in the control population acted as risk factors that increased the susceptibility to asthma. Haplotypes with lower allele frequencies in the case population than in the control population acted as protective factors that decreased the susceptibility to asthma. For Gene 845, two haplotypes were protective in the US population. They were haplotypes A/C (SNPs R1/R−1, p=0.0237) and A/G (SNPs R1/K−2, p=0.0268). Haplotypes G/C (SNPs R1/R−1, p=0.0308) and G/G (SNPs R1/K−2, p=0.0392) were susceptibility haplotypes in the US population. For Gene 847, two haplotypes were protective in the US population. They were haplotypes C/C (SNPs J+1/D−1, p=0.0409) and C/G (SNPs D−1/A1, p=0.0378). Haplotypes C/A (SNPs J+1/D−1, p=0.0113) and A/G (SNPs D−1/A1, p=0.0399) were susceptibility haplotypes in the US population. For Gene 962, seven haplotypes were susceptibility haplotypes in the combined population. They were haplotypes G/A (SNPs G4/G1, p=0.0175), G/G (SNPs G4/S−1, p=0.0066), A/G (SNPs G1/M+2, p=0.0107), A/A (SNPs G1/P−2, p=0.0054), A/A (SNPs G1/Q−1, p=0.0016), A/G (SNPs G1/S−1, p=0.0052) and ANT (SNPs G1/U2, p=0.004). The haplotype A/G (SNPs G4/G1, p=0.0211) was a protective haplotype in the combined population. Five haplotypes were susceptibility haplotypes in the UK population. They were G/A (SNPs G4/G1, p=0.0258), A/G (SNPs G1/M+2, p=0.0289), G/G (SNPs G1/S−1, p=0.02103), C/G (SNPs G6/S−1, p=0.0014) and C/C (SNPs G6/V−1, p=0.0084). Four haplotypes were protective haplotypes in the UK population. They were haplotypes G/C (SNPs G1/M+2, p=0.0171), G/C (SNPs G1/S−1, p=0.01065), C/C (SNPs G6/S−1, p=0.00239) and T/C (SNPs G6N-1, p=0.0085). Eight haplotypes were susceptibility haplotypes in the US population. They were haplotypes G/T (SNPs G4/U2, p=0.0446), A/A (SNPs G4/V+2, p=0.0433), ANA (SNPs G1/Q−1, p=0.003), A/T (SNPs G1/U2, p=0.0054), A/C (SNPs Q−1/V−1, p=0.0156), G/C (SNPs U1/Z1, p=0.0246), T/C (SNPs U2/V−1, p=0.0123) and T/G SNPs U2/V+2, p=0.0478). Four haplotypes were protective in the US population. They were haplotypes T/G (SNPs E3/G1, p=0.0118), T/C (SNPs Q−1/V−1, p=0.0123), G/T (SNPs Ul/Z1, p=0.0246) and C/C (SNPs U2/V−1, p=0.0225).

TABLE 36

| | | | | | |
|---|---|---|---|---|---|
| | SNP | | | | |
| | COMBI- | HAPLO- | FREQUENCIES | | P- |
| GENE | NATION | TYPE | CNTL | CASE | VALUE |

Specific IgE Combined
US and UK

| | | | | | |
|---|---|---|---|---|---|
| 962 | G4/G1 | GA | 0.208523 | 0.311853 | 0.0175 |
| 962 | G4/G1 | AG | 0.071601 | 0.009531 | 0.0211 |
| 962 | G4/S−1 | GG | 0.772436 | 0.886176 | 0.0066 |
| 962 | G1/M+2 | AG | 0.231629 | 0.346667 | 0.0107 |
| 962 | G1/P−2 | AA | 0.057605 | 0.15373 | 0.0054 |
| 962 | G1/Q−1 | AA | 0.049187 | 0.157002 | 0.0016 |
| 962 | G1/S−1 | AG | 0.23279 | 0.357599 | 0.0052 |
| 962 | G1/U2 | AT | 0.052762 | 0.147695 | 0.004 |

Specific IgE
UK Population

| | | | | | |
|---|---|---|---|---|---|
| 962 | G4/G1 | GA | 0.175073 | 0.282626 | 0.0258 |
| 962 | G1/M+2 | AG | 0.217702 | 0.329111 | 0.0289 |
| 962 | G1/M+2 | GC | 0.089986 | 0.010015 | 0.0171 |
| 962 | G1/S−1 | GG | 0.221485 | 0.339623 | 0.02103 |
| 962 | G1/S−1 | GC | 0.079171 | 0 | 0.01065 |
| 962 | G6/S−1 | CG | 0.681786 | 0.85033 | 0.0014 |
| 962 | G6/S−1 | CC | 0.101659 | 0 | 0.00239 |
| 962 | G6/V−1 | CC | 0.498551 | 0.660434 | 0.0084 |
| 962 | G6/V−1 | TC | 0.157531 | 0.042045 | 0.0085 |

Specific IgE
US Population

| | | | | | |
|---|---|---|---|---|---|
| 845 | R1/R−1 | GC | 0.504855 | 0.71875 | 0.0308 |
| 845 | R1/R−1 | AC | 0.17047 | 0 | 0.0237 |
| 845 | R1/K−2 | GG | 0.504855 | 0.721154 | 0.0392 |
| 845 | R1/K−2 | AG | 0.17047 | 0 | 0.0268 |
| 847 | J+1/D−1 | CA | 0.738791 | 0.938697 | 0.0113 |
| 847 | J+1/D−1 | CC | 0.176558 | 0.033525 | 0.0409 |
| 847 | D−1/A1 | AG | 0.817323 | 0.966667 | 0.0399 |
| 847 | D−1/A1 | CG | 0.175709 | 0.033333 | 0.0378 |
| 962 | E3/G1 | TG | 0.383347 | 0.110692 | 0.0118 |
| 962 | G4/U2 | GT | 0.191643 | 0.34375 | 0.0446 |
| 962 | G4/V+2 | AA | 0 | 0.03125 | 0.0433 |
| 962 | G1/Q−1 | AA | 0.042798 | 0.289956 | 0.003 |
| 962 | G1/U2 | AT | 0.039558 | 0.279877 | 0.0054 |
| 962 | Q−1/V−1 | AC | 0.217105 | 0.417425 | 0.0156 |
| 962 | Q−1/V−1 | TC | 0.433253 | 0.197514 | 0.0123 |
| 962 | U1/Z1 | GT | 0.3357 | 0.125 | 0.0164 |
| 962 | U1/Z1 | GC | 0.64507 | 0.84375 | 0.0246 |
| 962 | U2/V−1 | TC | 0.215811 | 0.40625 | 0.0123 |
| 962 | U2/V−1 | CC | 0.431687 | 0.209559 | 0.0225 |
| 962 | U2/V+2 | TG | 0.217236 | 0.375 | 0.0478 |

### Example 8

[0394] Genes Role in Asthma and Other Disorders

[0395] ADAM family proteins are known to interact with other cellular proteins. For example, the substrate of ADAM 19, NRG1, belongs to a group of growth factors (neuregulins) that are members of the epidermal growth factor family. The neuregulins participate in an array of biological effects that are mediated by the epidermal growth factor family of tyrosine kinase receptors. Data suggest that the proteolytically cleaved isoform of NRG1, NRG-β1, may induce the tyrosine phosphorylation of EGFR2 and EGFR3 in differentiated muscle cells (Shirakabe et. al., 2001, J. Biol. Chem. 276(12):9352-8).

[0396] Epidermal growth factor receptor (EGFR1) plays a pivotal role in the maintenance and repair of epithelial tissue. Following injury in bronchial epithelium, EGFR1 is upregulated in response to ligands acting on it or through transactivation of the EGFR1 receptor. This results in the increased proliferation of cells and airway remodeling at the point of insult, leading to the repair of the bronchial epithelium (Polosa et. al., 1999, Am. J. Respir. Cell Mol. Biol. 20:914-923; Holgate et. al., 1999, Clin. Exp. Allergy Suppl 2:90-95).

[0397] In asthma, the bronchial epithelium is highly abnormal, with structural changes involving separation of columnar cells from their basal attachments and functional changes that include increased expression and release of proinflammatory cytokines, growth factors, and mediator-generating enzymes. Beneath this damaged structure are the subepithelial myofibroblasts that have been activated to proliferate. This, in turn, causes excessive matrix deposition leading to abnormal thickening and increased density of the subepithelial basement membrane.

[0398] Immunocytochemical studies have shown that both TGF-β and EGFR1 are highly expressed at the area of injury and that parallel pathways could be operating in the repairing epithelial cells (Puddicombe et. al., 2000, FASEB J. 14:1362-1374). EGFR1 stimulates epithelial repair and TGF-β regulates the production of profibrogenic growth factors and proinflammatory cytokines leading to extracellular matrix synthesis. As EGFR1 is involved in regulating a number of different stages of epithelial repair (survival, migration, proliferation and differentiation), any inhibitory effects that act on the receptor may cause the epithelium to be held in a “state of repair” (Holgate et. al., 1999, Clin. Exp. Allergy Suppl 2:90-95).

[0399] It is possible that variant ADAM family proteins induce the epithelium into a continuous “state of repair” by functioning improperly and failing to release their substrates (members of the neuregulin family) that serve as the ligand for EGFR1. This, in turn, may cause the observed increase in EGFR1 expression. Under these circumstances, the TGF-β pathway remains active, producing a continuous source of proinflammatory products as well as growth factors that drive airway wall remodeling causing bronchial hyperresponsiveness, a phenotype of asthma.

[0400] Gene 845—ADAM 19

[0401] Human ADAM19 (meltrin-β) is a member of the disintegrin and metalloprotease family and maps to chromosome 5q32-q33. The transcript is ˜7.0 Kb in size and is found to be expressed in many tissues including lung (Wei P, et. al., Biochem Biophys Res Comm 280: 744-755 (2001)). Studies of ADAM19 expressed in muscle and bone suggest that it plays a role in osteogenesis and myogenesis (Kurisaki T, et. al., Mech Dev 73:211-215 (1998)). Further, it is purported to heterodimerize with ADAM12 and may be involved in aggregation and fusion of cells with different surface phenotypes (Yamamato S, et. al., Immunology Today 20:278-284 (1999)). In the lung, ADAM19 can be involved in the sequestering of cells, such as myofibroblasts, to areas of inflammation. ADAM 19 is most closely related to the asthma-associated gene Gene 216 (U.S. patent application Ser. No. 09/834,597). Mutations in ADAM19 could modulate the function of the gene. Four single nucleotide polymorphisms (SNPs) have been identified within the open reading frame (ORF) of ADAM19 that cause amino acid changes. One of those SNPs, Gene845_J_{—}1 is strongly associated with the disease. This amino acid change, serine to glycine, resides within the catalytic domain between two conserved residues, leucine and tryptophan. It is possible that this amino acid change in ADAM19 may alter the functional capacity of the catalytic domain in the protein leading to the onset of asthma and other respiratory disorders.

[0402] Gene 847—Neuregulin 2

[0403] Human Neuregulin 2 (NRG2) is a member of the neuregulin family of growth and differentiation factors and maps to chromosome 5q23-q33. The transcript size is ˜3.0 Kb in size and there are six alternatively transcribed species which encode six protein isoforms. NRG2 is expressed in a limited number of tissues, which includes lung. The NRG2 isoforms interact with the Erbb family of receptors, inducing the growth and differentiation of epithelial, neuronal, glial and other types of cells (Ring H et. al., Human Genetics 104:326-334 (1999)). In the lung, NRG2 may be involved in the differentiation of cell types, such as lung fibroblasts to myofibroblasts, which are recruited to the site of inflammation and partake in airway remodeling. Two SNPs have been identified within the ORF of NRG2 that cause amino acid changes. These amino acid changes in NRG2 can alter the functional capacity of the protein leading to the onset of asthma and other respiratory disorders.

[0404] Gene 891—Neuregulin 1

[0405] Human Neuregulin 1 (NRG1) is a member of the neuregulin family of growth and differentiation factors and maps to chromosome 8p21-p12. The transcript size is ˜2.0 Kb and there are nine alternatively transcribed species that encode nine protein isoforms. All NRG1 isoforms interact with the Erbb family of tyrosine kinase transmembrane receptors. The interaction of NRG1 isoforms with Erbb receptors 2/3 induces the growth and differentiation of epithelial, neuronal, glial, and other types of cells. NRG1 is the substrate of ADAM19, which is proteolytically cleaved allowing NRG1 to interact with Erbb2/3. In the lung, NRG1 maybe involved in the differentiation of cell types, such as lung fibroblasts to myofibroblasts, which are recruited to the site of inflammation and partake in airway remodeling. NRG1 has also been shown to activate the JAK-STAT pathway and regulate lung epithelial cell proliferation (Liu and Kern, Am. J. Respir. Mol. Biol. 27:306-13), thus implicating this gene in maintenance of epithelial integrity. It is possible that amino acid changes in NRG1 may alter the functional capacity of the protein leading to the onset of asthma and other respiratory disorders.

[0406] Gene 892—Endophilin1 (SH3GL2)

[0407] Human Endophilin 1 is a member of a family of proteins, which are adaptors that coordinate endocytosis, actin function and signaling cascades at the synapse and in non-neuronal cells. Endophilin 1 maps to 9p22. The transcript size is ˜2.7 Kb. ADAM9 and 15 have been shown to interact with Endophilin 1 by binding to the cytoplasmic domain of these proteins (Howard L, et. al., J Biol Chem 274:31693-31699 (1999)). Endophilin 1 may also interact with Gene216 at the cytoplasmic domain. The functional role of Endophilin 1 in non-neuronal cells is in membrane trafficking through clathrin-mediated endocytosis (Ringstad N, et. al., J Biol Chem [epub ahead of print] (2001)). This procedure is an important step in the process of modifying proteins en route to the membrane. It is possible that amino acid changes in Endophilin 1 may alter the functional capacity of the protein leading to the onset of asthma and other respiratory disorders.

[0408] Gene 893—Endophilin2 (SH3GL1)

[0409] Human Endophilin 2 is a member of a family of proteins, which are adaptors that coordinate endocytosis, actin function and signaling cascades at the synapse and in non-neuronal cells. Endophilin 2 maps to 19p13. The transcript size is ˜2.7 Kb. ADAM9 and 15 have been shown to interact with Endophilin 1 by binding to the cytoplasmic domain of these proteins (Howard L, et. al., J Biol Chem 274:31693-31699 (1999)). Endophilin 1 and 2 may interact with Gene216 at the cytoplasmic domain. The functional role of Endophilin 2 in non-neuronal cells, like Endophilin 1, is in membrane trafficking through clathrin-mediated endocytosis (Ringstad N, et. al., J Biol. Chem. 276(44): 40424-30 (2001)). This procedure is an important step in the process of modifying proteins en route to the membrane. It is possible that amino acid changes in Endophilin2 may alter the functional capacity of the protein leading to the onset of asthma and other respiratory disorders.

[0410] Gene 894—ADAM 3A

[0411] Human ADAM3a (cyritestin 1) is a member of the disintegrin and metalloprotease family and maps to chromosome 8p21-p12. The transcript is ˜2.6 Kb in size and is found to be expressed in testis (Adham I, et. al. DNA Cell Biol. 17: 161-168 (1998)). ADAM3a is involved in male fertility in mouse, however, in humans it appears to be non-functional (Grzmil P, et. al. Biochem J 357:551-556 (2001)). Based on the linkage analysis, ADAM3A and variants thereof can be involved in the onset of asthma and other respiratory disorders.

[0412] Gene 895—ADAM28

[0413] Human ADAM28 is a member of the disintegrin and metalloprotease family and maps to chromosome 8p21-p12. The transcript is 3.5 KB in size and highly expressed in epididymis and lymphocytes, and at lower levels in lung (Howard L, et. al., Biochem J 348:21-27 (2000)). Recently, ADAM28 has been shown to be a ligand for the leukocyte integrin alpha4beta1, implicating this gene in the interaction of lymphocytes with alpha4beta1-expressing leukocytes. Based on the linkage analysis, ADAM28 and variants thereof can be involved in the onset of asthma and other respiratory disorders.

[0414] Gene 896—ADAM7

[0415] Human ADAM7 is a member of the disintegrin and metalloprotease family and maps to chromosome 8p21-p12. There are two transcripts 4.0 and 3.0 Kb in size, which are expressed in the caput region of the epididymis and in the anterior pituitary gonadotropes. No expression was detected in the twenty-six other tissues examined including lung (Cornwall G A, Hsia N, Endocrinology 138:4262-4272 (1997) and Lin Y C, et. al. Biol Reprod 65:944-95 (2001)). Based on the linkage analysis, ADAM7 and variants thereof can be involved in the onset of asthma and other respiratory disorders.

[0416] Gene 897—ADAM9

[0417] Human ADAM9 is a member of the disintegrin and metalloprotease family and maps to chromosome 8q. The size of the transcript is ˜4.0 Kb and is expressed in many tissues including lung (Weskamp G, et. al., J Cell Biol 132:717-726 (1996)). ADAM9 has been shown to bind and proteolytically cleave the substrate heparin-binding EGF-like growth factor (HB-EGF). The secreted HB-EGF is a potent mitogen for a number of cell types and ADAM9 may act as a negative regulator (Izumi Y, et. al., EMBO 17:7260-7272 (1998)). Further, the cytoplasmic domain of ADAM9 has been shown to bind to Endophilin 1, which may modify the protein en route to its final destination at the cell surface. It is possible that amino acid changes in ADAM9 may alter the functional capacity of the protein leading to the onset of asthma and other respiratory disorders.

[0418] Gene 898—ADAM2

[0419] Human ADAM2 (Fertilin beta) is a member of the disintegrin and metalloprotease family and maps to chromosome 8p11.2. The size of the transcript is ˜2.8 Kb and is expressed in testis and prostate. ADAM2 is a cell adhesion molecule on the surface of mammalian sperm that participates in sperm-egg membrane binding (Evans J P, Bioessays 23:628-639 (2001)). Based on the linkage analysis, ADAM2 and variants thereof can be involved in the onset of asthma and other respiratory disorders.

[0420] Gene 899—ADAM18

[0421] Human ADAM18 is a member of the disintegrin and metalloprotease family and maps to chromosome 8p11.2. Based on the linkage analysis, ADAM18 and variants thereof can be involved in the onset of asthma and other respiratory disorders.

[0422] Gene 901—ADAMTS3

[0423] Human ADAMTS3 is an ADAM-related protein that possesses a disintegrin and metalloprotease domain as well as multiple copies of the thrombospondin motif. The gene maps to 4q13-q22 and the size of the transcript is ˜6.0 Kb. Like ADAMTS2, this gene has a limited expression profile: only expressed in adrenal gland, brain, breast, cervix, central nervous system, placenta, testis, and whole embryo. The enzyme encoded by this gene is similar in function to ADAMTS2; it excises the N-propeptide of type I, type II and type III procollagens (Tang B L, Int J Biochem Cell Biol 33:33-44 (2001)). Based on the linkage analysis, ADAMTS3 and variants thereof can be involved in the onset of asthma and other respiratory disorders.

[0424] Gene 902—ADAMTS9

[0425] Human ADAMTS9 is an ADAM-related protein that possesses a disintegrin and metalloprotease domain as well as multiple copies of the thrombospondin motif. The gene maps to 3p14.2-p14.3 and the size of the transcript is ˜4.0 Kb. It is expressed at low levels in adult tissues; however, RT/PCR analysis indicated that it was expressed in ovary, heart, kidney, lung, placenta and in many fetal tissues (Clark M E, et. al. Genomics 67:343-350 (2000)). Based on the linkage analysis, ADAMTS9 and variants thereof can be involved in the onset of asthma and other respiratory disorders.

[0426] Gene 903—Decysin

[0427] Human Decysin is a soluble ADAM-like protein that maps to chromosome 8p21-p12 between ADAM7 and 28. The transcript is ˜2.4 Kb in size and is expressed in limited number tissues that includes lung. Decysin is expressed in tissues where that demonstrate chronic antigen stimulation (Mueller C, et. al. J Exp Med 186:655-663 (1997)). The gene is expressed highly in mature dendritic cells that are localized to germinal centers. A continuous and high antigenic load in these sites may induce chronic interactions with dendritic and T-cells. Decysin maybe a key molecule in regulating the interaction of these cell types. Based on the linkage analysis, Decysin and variants thereof can be involved in the onset of asthma and other respiratory disorders.

[0428] Gene 962—ADAMTS2

[0429] Human ADAMTS2 is an ADAM-related protein that possesses a disintegrin and metalloprotease domain as well as multiple copies of the thrombospondin motif. The gene maps to chromosome 5q35 and the size of the transcript is ˜4.0 Kb. It has a limited expression profile: only found in breast, heart, kidney and uterus and skin. The enzyme encoded by this gene excises the N-propeptide of type I, type II and type V procollagens. Inactivating mutations in this gene cause Ehlers-Danlos syndrome type VIIC, a recessively inherited connective-tissue disorder (Colige A, et. al. Am J Hum Genet 65:308-317 (1999) and Shi-Wu L, et. al. Biochem J 355:271-278 (2001)). Based on the linkage analysis, ADAMTS2 and variants thereof can be involved in the onset of asthma and other respiratory disorders.

What is claimed is:

1. An isolated nucleic acid variant comprising a nucleotide sequence selected from the group shown in Table 2.

2. An isolated nucleic acid variant comprising a nucleotide sequence which contains at least one single nucleotide polymorphism as set forth in Tables 2-5 and 7, SEQ ID NOs. 1-9, and FIGS. 1-12.

3. An isolated nucleic acid variant comprising at least 15 contiguous nucleotides of a nucleotide sequence which contains at least one single nucleotide polymorphism as set forth in Tables 2-5 and 7, SEQ ID NOs. 1-9, and FIGS. 1-12.

4. An isolated nucleic acid comprising a nucleotide sequence that is complementary to the nucleotide sequence of the nucleic acid according to claim 2.

5. An isolated alternate splice variant comprising a nucleotide sequence shown in Tables 2-5 and 7, SEQ ID NOs. 1-9, and FIGS. 1-12.

6. An isolated alternate splice variant comprising at least 15 contiguous nucleotides of a nucleotide sequence selected from the sequences shown in Tables 2-5 and 7, SEQ ID NOs. 1-9, and FIGS. 1-12.

7. An isolated nucleic acid comprising a nucleotide sequence that is complementary to the nucleotide sequence according to claim 5.

8. A vector comprising the nucleic acid variant according to claim 2.

9. A vector comprising the nucleic acid variant according to claim 5.

10. A vector comprising the nucleic acid variant according to claim 3.

11. A vector comprising the nucleic acid variant according to claim 6.

12. A host cell comprising the vector according to claim 8, wherein the host cell is selected from the group consisting of bacterial, yeast, insect, mammalian, and plant cells.

13. A host cell comprising the vector according to claim 9, wherein the host cell is selected from the group consisting of bacterial, yeast, insect, mammalian, and plant cells.

14. A host cell comprising the vector according to claim 10, wherein the host cell is selected from the group consisting of bacterial, yeast, insect, mammalian, and plant cells.

15. A host cell comprising the vector according to claim 11, wherein the host cell is selected from the group consisting of bacterial, yeast, insect, mammalian, and plant cells.

16. An isolated polypeptide encoded by the nucleic acid variant according to claim 2.

17. An isolated polypeptide encoded by the alternate splice variant according to claim 5.

18. An antibody or antibody fragment that binds to the polypeptide according to claim 16.

19. An antibody or antibody fragment that binds to the polypeptide according to claim 17.

20. The antibody or antibody fragment according to claim 18 which is monoclonal.

21. The antibody or antibody fragment according to claim 19 which is monoclonal.

22. A pharmaceutical composition comprising the nucleic acid according to claim 2, and a physiologically acceptable carrier, excipient, or diluent.

23. A pharmaceutical composition comprising the nucleic acid according to claim 5, and a physiologically acceptable carrier, excipient, or diluent.

24. A pharmaceutical composition comprising the vector according to claim 8, and a physiologically acceptable carrier, excipient, or diluent.

25. A pharmaceutical composition comprising the vector according to claim 9, and a physiologically acceptable carrier, excipient, or diluent.

26. A pharmaceutical composition comprising the polypeptide according to claim 16, and a physiologically acceptable carrier, excipient, or diluent.

27. A pharmaceutical composition comprising the polypeptide according to claim 17, and a physiologically acceptable carrier, excipient, or diluent.

28. A pharmaceutical composition comprising the antibody according to claim 20, and a physiologically acceptable carrier, excipient, or diluent.

29. A pharmaceutical composition comprising the antibody according to claim 21, and a physiologically acceptable carrier, excipient, or diluent.

30. A kit for detecting an ADAM gene nucleotide sequence comprising:
a) the isolated nucleic acid variant according to claims 2 or 5; and
b) at least one component to detect hybridization of the isolated nucleic acid to an ADAM gene nucleotide sequence.

31. A kit for detecting an Interactor gene nucleotide sequence comprising:
a) the isolated nucleic acid variant according to claims 2 or 5; and
b) at least one component to detect hybridization of the isolated nucleic acid to an Interactor nucleotide sequence.

32. A kit for detecting an ADAM gene amino acid sequence comprising:
a) the antibody or antibody fragment according to claims 20 or 21; and
b) at least one component to detect binding of the antibody to an ADAM gene amino acid sequence.

33. A kit for detecting an Interactor gene amino acid sequence comprising:
a) the antibody or antibody fragment according to claims 20 or 21; and
b) at least one component to detect binding of the antibody to an Interactor gene amino acid sequence.

34. A method of diagnosing an ADAM gene-associated disorder in a human subject, comprising:
a) contacting the nucleic acid according to claim 1 with a biological sample obtained from the subject;
b) incubating the nucleic acid and biological sample under high stringency conditions that allow the nucleic acid to hybridize to a nucleic acid in the sample, and thereby form a complex; and
c) detecting the hybridization complex of (b), wherein detection of the complex indicates diagnosis of an ADAM gene-associated disorder.

35. The method of claim 34, wherein the disorder is selected from the group consisting of asthma, atopy, obesity, and inflammatory bowel disease.

36. A method of diagnosing an ADAM gene-associated disorder in a human subject, comprising:
a) contacting the antibody or antibody fragment according to claims 20 or 21 with a biological sample obtained from the subject;
b) incubating the antibody or antibody fragment and biological sample under conditions to allow the antibody or antibody fragment to bind to an amino acid sequence in the sample, and thereby form a complex; and
c) detecting the complex of (b), wherein detection of the complex indicates diagnosis of an ADAM gene-associated disorder.

37. The method according to claim 36, wherein the disorder is selected from the group consisting of asthma, atopy, obesity, and inflammatory bowel disease.

38. A method of diagnosing an Interactor gene-associated disorder in a human subject, comprising:
a) contacting the nucleic acid according to claim 1 with a biological sample obtained from the subject;
b) incubating the nucleic acid and biological sample under high stringency conditions that allow the nucleic acid to hybridize to a nucleic acid in the sample, and thereby form a complex; and
c) detecting the hybridization complex of (b), wherein detection of the complex indicates diagnosis of an Interactor gene-associated disorder.

39. The method of claim 38, wherein the disorder is selected from the group consisting of asthma, atopy, obesity, and inflammatory bowel disease.

40. A method of diagnosing an Interactor gene-associated disorder in a human subject, comprising:
a) contacting the antibody or antibody fragment according to claims 20 or 21 with a biological sample obtained from the subject;
b) incubating the antibody or antibody fragment and biological sample under conditions to allow the antibody or antibody fragment to bind to an amino acid sequence in the sample, and thereby form a complex; and
c) detecting the complex of (b), wherein detection of the complex indicates diagnosis of an ADAM gene-associated disorder.

41. The method according to claim 40, wherein the disorder is selected from the group consisting of asthma, atopy, obesity, and inflammatory bowel disease.

42. A method of determining an ADAM gene pharmacogenetic profile for a human subject comprising:
a) contacting the nucleic acid variant according to claims 2 or 5 with a biological sample obtained from the subject;
b) incubating the nucleic acid and biological sample under high stringency conditions to allow the nucleic acid to hybridize to a nucleic acid in the sample, and thereby form a complex;
c) detecting the hybridization complex of (b), wherein detection of the complex determines the ADAM gene pharmacogenetic profile.

43. A method of determining a ADAM gene pharmacogenetic profile for a human subject comprising:
a) contacting the antibody or antibody fragment according to claims 20 or 21 with a biological sample obtained from the subject;
b) incubating the antibody or antibody fragment with the biological sample under conditions that allow the antibody to bind to an amino acid sequence in the sample, and thereby form a complex; and
c) detecting the complex of (b), wherein detection of the complex determines the ADAM gene pharmacogenetic profile.

44. A method of determining an Interactor gene pharmacogenetic profile for a human subject comprising:
a) contacting the nucleic acid variant according to claims 2 or 5 with a biological sample obtained from the subject;
b) incubating the nucleic acid and biological sample under high stringency conditions to allow the nucleic acid to hybridize to a nucleic acid in the sample, and thereby form a complex;
c) detecting the hybridization complex of (b), wherein detection of the complex determines the Interactor gene pharmacogenetic profile.

45. A method of determining an Interactor gene pharmacogenetic profile for a human subject comprising:
a) contacting the antibody or antibody fragment according to claims 20 or 21 with a biological sample obtained from the subject;
b) incubating the antibody or antibody fragment with the biological sample under conditions that allow the antibody to bind to an amino acid sequence in the sample, and thereby form a complex; and
c) detecting the complex of (b), wherein detection of the complex determines the Interactor gene pharmacogenetic profile.

46. A method of identifying an ortholog of a human ADAM gene, comprising:
a) contacting the isolated nucleic acid variant according to claims 2 or 5 with a biological sample obtained from a non-human animal;
b) incubating the nucleic under conditions that allow the nucleic acid to hybridize to a nucleic acid in the sample, and thereby form a complex; and
c) detecting the hybridization complex of (a), wherein detection of the complex indicates identification of an ortholog of a human ADAM gene.

47. A method of identifying an ortholog of a human Interactor gene, comprising:
a) contacting the isolated nucleic acid variant according to claims 2 or 5 with a biological sample obtained from a non-human animal;
b) incubating the nucleic under conditions that allow the nucleic acid to hybridize to a nucleic acid in the sample, and thereby form a complex; and
c) detecting the hybridization complex of (a), wherein detection of the complex indicates identification of an ortholog of a human Interactor gene.

48. A method of treating an ADAM gene-associated disorder in a human subject comprising administering to the subject a pharmaceutical composition which comprises the vector according to claims 8 or 9, and a physiologically acceptable carrier, excipient, or diluent, in an amount effective to treat the disorder.

49. The method according to claim 48, wherein the ADAM gene-associated disorder is selected from the group consisting of asthma, atopy, obesity, and inflammatory bowel disease.

50. A method of treating a ADAM gene-associated disorder in a human subject comprising administering to the subject a pharmaceutical composition which comprises the host cell according to claims 12 or 13, and a physiologically acceptable carrier, excipient, or diluent, in an amount effective to treat the disorder.

51. The method according to claim 50, wherein the ADAM gene-associated disorder is selected from the group consisting of asthma, atopy, obesity, and inflammatory bowel disease.

52. A method of treating a ADAM gene-associated disorder in a human subject comprising administering to the subject a pharmaceutical composition which comprises the isolated nucleic acid variant according to claims 2 or 5, and a physiologically acceptable carrier, excipient or diluent, in an amount effective to treat the disorder.

53. The method according to claim 52, wherein the ADAM gene-associated disorder is selected from the group consisting of asthma, atopy, obesity, and inflammatory bowel disease.

54. A method of treating a ADAM gene-associated disorder in a human subject comprising administering to the subject a pharmaceutical composition which comprises the isolated polypeptide according to claims 16 or 17, and a physiologically acceptable carrier, excipient or diluent, in an amount effective to treat the disorder.

55. The method according to claim 54, wherein the ADAM gene-associated disorder is selected from the group consisting of asthma, atopy, obesity, and inflammatory bowel disease.

56. A method of treating an ADAM gene-associated disorder in a human subject comprising administering to the subject a pharmaceutical composition which comprises the antibody or antibody fragment according to claims 20 or 21, and a physiologically acceptable carrier, excipient or diluent, in an amount effective to treat the disorder.

57. The method according to claim 56, wherein the ADAM gene-associated disorder is selected from the group consisting of asthma, atopy, obesity, and inflammatory bowel disease.

58. A method of treating an Interactor gene-associated disorder in a human subject comprising administering to the subject a pharmaceutical composition which comprises the vector according to claims 8 or 9, and a physiologically acceptable carrier, excipient, or diluent, in an amount effective to treat the disorder.

59. The method according to claim 58, wherein the Interactor gene-associated disorder is selected from the group consisting of asthma, atopy, obesity, and inflammatory bowel disease.

60. A method of treating a Interactor gene-associated disorder in a human subject comprising administering to the subject a pharmaceutical composition which comprises the host cell according to claims 12 or 13, and a physiologically acceptable carrier, excipient, or diluent, in an amount effective to treat the disorder.

61. The method according to claim 60, wherein the Interactor gene-associated disorder is selected from the group consisting of asthma, atopy, obesity, and inflammatory bowel disease.

62. A method of treating a Interactor gene-associated disorder in a human subject comprising administering to the subject a pharmaceutical composition which comprises the isolated nucleic acid variant according to claims 2 or 5, and a physiologically acceptable carrier, excipient or diluent, in an amount effective to treat the disorder.

63. The method according to claim 62, wherein the Interactor gene-associated disorder is selected from the group consisting of asthma, atopy, obesity, and inflammatory bowel disease.

64. A method of treating a Interactor gene-associated disorder in a human subject comprising administering to the subject a pharmaceutical composition which comprises the isolated polypeptide according to claims 16 or 17, and a physiologically acceptable carrier, excipient or diluent, in an amount effective to treat the disorder.

65. The method according to claim 64, wherein the Interactor gene-associated disorder is selected from the group consisting of asthma, atopy, obesity, and inflammatory bowel disease.

66. A method of treating an Interactor gene-associated disorder in a human subject comprising administering to the subject a pharmaceutical composition which comprises the antibody or antibody fragment according to claims 20 or 21, and a physiologically acceptable carrier, excipient or diluent, in an amount effective to treat the disorder.

67. The method according to claim 66, wherein the Interactor gene-associated disorder is selected from the group consisting of asthma, atopy, obesity, and inflammatory bowel disease.

68. A transgenic mouse whose genome comprises an introduced null mutation in an endogenous gene which is orthologous to a human ADAM gene comprising a nucleotide sequence according to claims 2 or 5.

69. The transgenic mouse according to claim 68, wherein both alleles of the endogenous gene have been disrupted.

70. The transgenic mouse according to claim 69, wherein the mouse genome further comprises a human ADAM gene variant nucleotide sequence selected from the group shown in Tables 2-5 and 7, SEQ ID NOs. 1-9, and FIGS. 1-12.

71. The transgenic mouse according to claim 69, wherein the mouse genome further comprises a human Interactor gene variant nucleotide sequence selected from the group shown in Tables 2-5 and 7, SEQ ID NOs. 1-9, and FIGS. 1-12.

72. A method of making a homozygous transgenic knockout mouse comprising:
a) disrupting an endogenous gene in mouse embryonic stem cells, wherein the endogenous gene is orthologous to a human ADAM gene variant comprising a nucleotide sequence selected from the group shown in Tables 2-5 and 7, SEQ ID NOs. 1-9, and FIGS. 1-12;
b) introducing said embryonic stem cells into a mouse blastocyst and transplanting said blastocyst into a pseudopregnant mouse;
c) allowing said blastocyst to develop into a chimeric mouse;
d) breeding said chimeric mouse to produce offspring; and
e) screening said offspring to identify a homozygous transgenic knockout mouse.

73. A method of making a homozygous transgenic knockout mouse comprising:
a) disrupting an endogenous gene in mouse embryonic stem cells, wherein the endogenous gene is orthologous to a human Interactor gene variant comprising a nucleotide sequence selected from the group shown in Tables 2-5 and 7, SEQ ID NOs. 1-9, and FIGS. 1-12;
b) introducing said embryonic stem cells into a mouse blastocyst and transplanting said blastocyst into a pseudopregnant mouse;
c) allowing said blastocyst to develop into a chimeric mouse;
d) breeding said chimeric mouse to produce offspring; and
e) screening said offspring to identify a homozygous transgenic knockout mouse.

74. A method of forming a crystal of the isolated polypeptide according to claim 16 comprising:
a) incubating the polypeptide with a solution under conditions to allow crystalization; and
b) detecting the crystalization in (a), whereby crystalization indicates formation of a crystal.

75. A method of forming a crystal of the isolated polypeptide according to claim 17 comprising:
a) incubating the polypeptide with a solution under conditions to allow crystalization; and
b) detecting the crystalization in (a), whereby crystalization indicates formation of a crystal.

76. A cell line comprising the isolated nucleic acid variant according to claim 2.

77. A cell line comprising the isolated nucleic acid variant according to claim 5.

78. A biochip comprising the isolated nucleic acid variant according to claim 2.

79. A biochip comprising the isolated nucleic acid variant according to claim 5.

80. An isolated nucleic acid probe comprising at least 8 contiguous nucleotides of a nucleotide sequence selected from Tables 2-5 and 7.

81. An isolated nucleic acid probe comprising at least 8 contiguous nucleotides of a nucleotide sequence selected from SEQ ID NOs: 1-9, and FIGS. 1-12.

82. An isolated nucleic acid primer comprising at least 8 contiguous nucleotides of a nucleotide sequence selected from Tables 2-5 and 7.

83. An isolated nucleic acid primer comprising at least 8 contiguous nucleotides of a nucleotide sequence selected from SEQ ID NOs: 1-9, and FIGS. 1-12.

84. An isolated antisense nucleic acid comprising the nucleotide sequence according to claim 2.

85. An isolated antisense nucleic acid comprising the nucleotide sequence according to claim 5.

86. A method of identifying an ADAM gene ligand, comprising:
a) contacting the isolated polypeptide according to claims 16 or 18 with a test agent;
b) incubating the isolated polypeptide and the test agent under conditions that allow the polypeptide to bind to the test agent, and thereby form a complex; and
c) detecting the complex of (b), wherein detection of the complex indicates identification of an ADAM gene ligand.

87. A method of identifying an ADAM gene ligand, comprising:
a) contacting a polypeptide comprising at least 7 contiguous amino acids of the isolated polypeptide according to claims 16 or 18 with a test agent;
b) incubating the polypeptide and the test agent under conditions that allow the polypeptide to bind to the test agent, and thereby form a complex; and
c) detecting the complex of (b), wherein detection of the complex indicates identification of an ADAM gene ligand.

88. A method of identifying an ADAM gene ligand, comprising:
a) contacting the isolated nucleic acid variant according to claims 2 or 5 with a test agent;
b) incubating the isolated nucleic acid and the test agent under conditions that allow the nucleic acid to bind to the test agent, and thereby form a complex; and
c) detecting the complex of (b), wherein detection of the complex indicates identification of an ADAM gene ligand.

89. The method according to claim 86, wherein the test agent comprises a small molecule.

90. The method according to claim 87, wherein the test agent comprises a small molecule.

91. The method according to claim 88, wherein the test agent comprises a small molecule.

92. A method of identifying an Interactor gene ligand, comprising:
a) contacting the isolated polypeptide according to claims 16 or 17 with a test agent;
b) incubating the isolated polypeptide and the test agent under conditions that allow the polypeptide to bind to the test agent, and thereby form a complex; and
c) detecting the complex of (b), wherein detection of the complex indicates identification of an Interactor gene ligand.

93. A method of identifying an Interactor gene ligand, comprising:
a) contacting a polypeptide comprising at least 7 contiguous amino acids of the isolated polypeptide according to claims 16 or 17 with a test agent;
b) incubating the polypeptide and the test agent under conditions that allow the polypeptide to bind to the test agent, and thereby form a complex; and
c) detecting the complex of (b), wherein detection of the complex indicates identification of an Interactor gene ligand.

94. A method of identifying an Interactor gene ligand, comprising:
a) contacting the isolated nucleic acid variant according to claims 2 or 5 with a test agent;
b) incubating the isolated nucleic acid and the test agent under conditions that allow the nucleic acid to bind to the test agent, and thereby form a complex; and
c) detecting the complex of (b), wherein detection of the complex indicates identification of an Interactor gene ligand.

95. The method according to claim 92, wherein the test agent comprises a small molecule.

96. The method according to claim 93, wherein the test agent comprises a small molecule.

97. The method according to claim 94, wherein the test agent comprises a small molecule.

98. A method of treating an ADAM gene-associated disorder in a human subject comprising administering to the subject a pharmaceutical composition which comprises the ligand isolated by the method according to claim 86, and a physiologically acceptable carrier, excipient or diluent, in an amount effective to treat the disorder.

99. A method of treating an ADAM gene-associated disorder in a human subject comprising administering to the subject a pharmaceutical composition which comprises the ligand isolated by the method according to claim 87, and a physiologically acceptable carrier, excipient or diluent, in an amount effective to treat the disorder.

100. A method of treating an ADAM gene-associated disorder in a human subject comprising administering to the subject a pharmaceutical composition which comprises the ligand isolated by the method according to claim 88, and a physiologically acceptable carrier, excipient or diluent, in an amount effective to treat the disorder.

101. A method of treating an Interactor gene-associated disorder in a human subject comprising administering to the subject a pharmaceutical composition which comprises the ligand isolated by the method according to claim 92, and a physiologically acceptable carrier, excipient or diluent, in an amount effective to treat the disorder.

102. A method of treating an Interactor gene-associated disorder in a human subject comprising administering to the subject a pharmaceutical composition which comprises the ligand isolated by the method according to claim 93, and a physiologically acceptable carrier, excipient or diluent, in an amount effective to treat the disorder.

103. A method of treating an Interactor gene-associated disorder in a human subject comprising administering to the subject a pharmaceutical composition which comprises the ligand isolated by the method according to claim 94, and a physiologically acceptable carrier, excipient or diluent, in an amount effective to treat the disorder.

104. A method of diagnosing a respiratory disorder in a human subject, comprising:
a) contacting a nucleic acid sequence of an ADAM gene variant with a biological sample obtained from the subject;
b) incubating the nucleic acid and biological sample under high stringency conditions that allow the nucleic acid to hybridize to a nucleic acid in the sample, and thereby form a complex; and
c) detecting the hybridization complex of (b), wherein detection of the complex indicates diagnosis of a respiratory disorder.

105. The method according to claim 104, wherein the respiratory disorder is asthma or atopy.

106. A method of diagnosing a respiratory disorder in a human subject, comprising:
a) contacting a nucleic acid sequence of an Interactor gene variant with a biological sample obtained from the subject;
b) incubating the nucleic acid and biological sample under high stringency conditions that allow the nucleic acid to hybridize to a nucleic acid in the sample, and thereby form a complex; and
c) detecting the hybridization complex of (b), wherein detection of the complex indicates diagnosis of a respiratory disorder.

107. The method according to claim 106, wherein the respiratory disorder is asthma or atopy.

108. A method of diagnosing a respiratory disorder in a human subject, comprising:
a) contacting an ADAM gene polypeptide antibody or antibody fragment with a biological sample obtained from the subject;
b) incubating the antibody or antibody fragment and biological sample under conditions that allow the antibody or antibody fragment to bind to an amino acid sequence in the sample, and thereby form a complex; and
c) detecting the complex of (b), wherein detection of the complex indicates diagnosis of a respiratory disorder.

109. The method according to claim 108, wherein the respiratory disorder is asthma or atopy.

110. A method of diagnosing a respiratory disorder in a human subject, comprising:
a) contacting an Interactor gene polypeptide antibody or antibody fragment with a biological sample obtained from the subject;
b) incubating the antibody or antibody fragment and biological sample under conditions that allow the antibody or antibody fragment to bind to an amino sequence in the sample, and thereby form a complex; and
c) detecting the complex of (b), wherein detection of the complex indicates diagnosis of a respiratory disorder.

111. The method according to claim 110, wherein the respiratory disorder is asthma or atopy.

112. A method of treating a respiratory disorder in a human subject comprising administering to the subject a pharmaceutical composition which comprises an isolated nucleic acid sequence of an ADAM gene, and a physiologically acceptable carrier, excipient, or diluent, in an amount effective to treat the respiratory disorder.

113. The method according to claim 112, wherein the respiratory disorder is asthma or atopy.

114. A method of treating a respiratory disorder in a human subject comprising administering to the subject a pharmaceutical composition which comprises an isolated nucleic acid sequence of an Interactor gene, and a physiologically acceptable carrier, excipient, or diluent, in an amount effective to treat the respiratory disorder.

115. The method according to claim 114, wherein the respiratory disorder is asthma or atopy.

116. A method of treating a respiratory disorder in a human subject comprising administering to the subject a pharmaceutical composition which comprises a vector comprising an ADAM gene nucleotide sequence, and a physiologically acceptable carrier, excipient, or diluent, in an amount effective to treat the respiratory disorder.

117. The method according to claim 116, wherein the respiratory disorder is asthma or atopy.

118. A method of treating a respiratory disorder in a human subject comprising administering to the subject a pharmaceutical composition which comprises a vector comprising an Interactor gene nucleotide sequence, and a physiologically acceptable carrier, excipient, or diluent, in an amount effective to treat the respiratory disorder.

119. The method according to claim 118, wherein the respiratory disorder is asthma or atopy.

120. A method of treating a respiratory disorder in a human subject comprising administering to the subject a pharmaceutical composition which comprises a host cell comprising an ADAM gene nucleotide sequence, and a physiologically acceptable carrier, excipient, or diluent, in an amount effective to treat the respiratory disorder.

121. The method according to claim 120, wherein the respiratory disorder is asthma or atopy.

122. A method of treating a respiratory disorder in a human subject comprising administering to the subject a pharmaceutical composition which comprises a host cell comprising an Interactor gene nucleotide sequence, and a physiologically acceptable carrier, excipient, or diluent, in an amount effective to treat the respiratory disorder.

123. The method of claim 122, wherein the respiratory disorder is asthma or atopy.

124. A method of treating a respiratory disorder in a human subject comprising administering to the subject a pharmaceutical composition which comprises an isolated polypeptide encoded by an ADAM gene nucleotide sequence, and a physiologically acceptable carrier, excipient, or diluent, in an amount effective to treat the respiratory disorder.

125. The method of claim 124, wherein the respiratory disorder is asthma or atopy.

126. A method of treating a respiratory disorder in a human subject comprising administering to the subject a pharmaceutical composition which comprises an isolated polypeptide encoded by an Interactor gene nucleotide sequence, and a physiologically acceptable carrier, excipient, or diluent, in an amount effective to treat the respiratory disorder.

127. The method of claim 126, wherein the respiratory disorder is asthma or atopy.

128. A method of treating a respiratory disorder in a human subject comprising administering to the subject a pharmaceutical composition which comprises an ADAM protein antibody or antibody fragment, and a physiologically acceptable carrier, excipient, or diluent, in an amount effective to treat the respiratory disorder.

129. The method according to claim 128, wherein the respiratory disorder is asthma or atopy.

130. A method of treating a respiratory disorder in a human subject comprising administering to the subject a pharmaceutical composition which comprises Interactor protein antibody or antibody fragment, and a physiologically acceptable carrier, excipient, or diluent, in an amount effective to treat the respiratory disorder.

131. The method according to claim 130, wherein the respiratory disorder is asthma or atopy.

132. A method of diagnosing an ADAM or Interactor gene-associated disorder in a human subject, comprising:
a) contacting a nucleic acid shown in Table 7 with a biological sample obtained from the subject;
b) incubating the nucleic acid and biological sample under high stringency conditions that allow the nucleic acid to hybridize to a nucleic acid in the sample, and thereby form a complex; and
c) detecting the hybridization complex of (b), wherein detection of the complex indicates diagnosis of an ADAM or Interactor gene-associated disorder.

133. The method of claim 132, wherein the disorder is selected from the group consisting of asthma, atopy, obesity, and inflammatory bowel disease.

134. An isolated nucleic acid variant of Gene 803 which contains at least allele A at single nucleotide polymorphism K 2.

135. An isolated nucleic acid variant of Gene 845 which contains at least one allele selected from the group consisting of:
a. allele T at single nucleotide polymorphism P+1;
b. allele G at single nucleotide polymorphism J 1; and
c. allele T at single nucleotide polymorphism D−1.

136. An isolated nucleic acid variant of Gene 847 which contains at least allele G at single nucleotide polymorphism C+1.

137. An isolated nucleic acid variant of Gene 962 which contains at least one allele selected from the group consisting of:
a. allele C at single nucleotide polymorphism M+2;
b. allele A at single nucleotide polymorphism P−2;
c. allele A at single nucleotide polymorphism Q−1;
d. allele T at single nucleotide polymorphism U2;
e. allele C at single nucleotide polymorphism V−1;
f. allele G at single nucleotide polymorphism G4;
g. allele A at single nucleotide polymorphism G1;
h. allele C at single nucleotide polymorphism G6;
i. allele G at single nucleotide polymorphism M+2;
j. allele G at single nucleotide polymorphism S−1; and
k. allele C at single nucleotide polymorphism Z1.

138. An isolated nucleic acid variant of Gene 803 which contains at least one haplotype selected from the group consisting of:
a. haplotype C/A at single polymorphisms K3/K2;
b. haplotype A/G at single polymorphisms K2/I−1;
C. haplotype A/C at single polymorphisms K2/I1;
d. haplotype A/A at single polymorphisms K2/E+2;
e. haplotype G/C at single polymorphisms K2/I1; and
f. haplotype G/C at single polymorphisms K2/E+2.

139. An isolated nucleic acid variant of Gene 845 which contains at least one haplotype selected from the group consisting of:
a. haplotype G/G at single polymorphisms R1/K−2;
b. haplotype C/T at single polymorphisms K1/D−1;
C. haplotype G/C at single polymorphisms K−2/H+1;
d. haplotype T/G at single polymorphisms R−1/J1;
e. haplotype G/T at single polymorphisms K−2/D1;
f. haplotype G/C at single polymorphisms J1/D1;
g. haplotype A/T at single polymorphisms J1/D1;
h. haplotype C/T at single polymorphisms H−1/D1;
i. haplotype C/T at single polymorphisms D1/D−1;
j. haplotype T/T at single polymorphisms D1/D−1;
k. haplotype T/C at single polymorphisms P+1/H+1;
l. haplotype C/C at single polymorphisms K1/H+1;
m. haplotype G/C at single polymorphisms R1/R−1;
n. haplotype A/G at single polymorphisms R1/K−2;
o. haplotype C/C at single polymorphisms K1/D−1;
p. haplotype A/C at single polymorphisms J1/D1;
q. haplotype C/C at single polymorphisms D1/D−1;
r. haplotype C/G at single polymorphisms K1/H+1; and
s. haplotype A/C at single polymorphisms R1/R−1.

140. An isolated nucleic acid variant of Gene 847 which contains at least one haplotype selected from the group consisting of:
a. haplotype G/C at single polymorphisms K1/D−1;
b. haplotype G/A at single polymorphisms K1/C+1;
c. haplotype C/T at single polymorphisms J+1/E+1;
d. haplotype C/A at single polymorphisms J+1/D−1;
e. haplotype C/A at single polymorphisms J+1/C+1;
f. haplotype A/C at single polymorphisms D−1/A2;
g. haplotype A/C at single polymorphisms C+1/A2;
h. haplotype A/G at single polymorphisms D−1/A1;
i. haplotype G/G at single polymorphisms K1/C+1;
j. haplotype C/C at single polymorphisms J+1/D−1;
k. haplotype C/G at single polymorphisms J+1/C+1; and
l. haplotype C/G at single polymorphisms D−1/A1.

141. An isolated nucleic acid variant of Gene 962 which contains at least one haplotype selected from the group consisting of:
a. haplotype A/A at single polymorphisms G1/Q−1;
b. haplotype A/C at single polymorphisms G1/V−1;
c. haplotype G/A at single polymorphisms G4/G1;
d. haplotype G/A at single polymorphisms G4/Q−1;
e. haplotype G/T at single polymorphisms G4/U2;
f. haplotype A/A at single polymorphisms G4/V+2;
g. haplotype A/T at single polymorphisms G1/U2;
h. haplotype T/G at single polymorphisms U2/V+2;
i. haplotype A/C at single polymorphisms G2/S−1;
j. haplotype T/A at single polymorphisms E+2/G1;
k. haplotype A/A at single polymorphisms G1/P−2;
l. haplotype G/C at single polymorphisms G4/G6;
m. haplotype C/G at single polymorphisms G6/S−1;
n. haplotype G/A at single polymorphisms G4/Q−1;
o. haplotype G/A at single polymorphisms M+2/P−2;
p. haplotype G/G at single polymorphisms G4/S−1;
q. haplotype A/G at single polymorphisms G1/M+2;
r. haplotype A/G at single polymorphisms G1/S−1;
s. haplotype G/G at single polymorphisms G1/S−1;
t. haplotype C/C at single polymorphisms G6/V−1;
u. haplotype A/C at single polymorphisms Q−1/V−1;
v. haplotype G/C at single polymorphisms U1/Z1;
w. haplotype T/C at single polymorphisms U2/V−1;
x. haplotype T/G at single polymorphisms E3/G1;
y. haplotype T/C at single polymorphisms Q−1/V−1;
z. haplotype G/T at single polymorphisms U1/Z1;
aa. haplotype C/C at single polymorphisms U2/V−1;
bb. haplotype A/C at single polymorphisms H+2/S−1;
cc. haplotype C/T at single polymorphisms E+2/V−1;
dd. haplotype G/T at single polymorphisms G1/G6;
ee. haplotype C/C at single polymorphisms G6/S−1;
ff. haplotype G/C at single polymorphisms G1/M+2;
gg. haplotype G/C at single polymorphisms G1/S−1;
hh. haplotype C/C at single polymorphisms G6/S−1;
ii. haplotype T/C at single polymorphisms G6/V−1;
jj. haplotype A/G at single polymorphisms G4/G1;
kk. haplotype C/T at single polymorphisms E+2/V−1;
ll. haplotype G/A at single polymorphisms G1/Q−1;
mm. haplotype T/G at single polymorphisms G6/S−1; and
nn. haplotype G/G at single polymorphisms M+2/P−2.

142. An isolated nucleic acid which is complementary to the nucleic acid of any one of claims 134-141.

143. A probe comprising the isolated nucleic acid of any one of claims 134-141.

144. A primer comprising the isolated nucleic acid of any one of claims 131-141.

145. An isolated amino acid sequence encoded by the isolated nucleic acid of any one of claims 134-141.

146. An antibody which binds to the isolated amino acid sequence of claim 166, wherein the antibody is polyclonal or monoclonal.

147. A vector comprising the isolated nucleic acid of any one of claims 134-141.

148. A pharmaceutical composition comprising the isolated nucleic acid of any one of claims 134-141.

The application's sequence listing, which the Patent Office published only in electronic form, follows.

SEQUENCE LISTING (9 sequences)

SEQ ID NO: 1 - DNA, 304905 bp, Homo sapien
aagcttctagaagtactgtgtcctgtaatcccctcctcgggcttttaacaatatcttgttgaatctcccccacccctcaaagcaccctccctccccacagttatctcagccccacaagaaaaaggagatgaccagccccattggacagatggggaaactgaggcctagaagctggggatttacaagatcccaagaactctgccagaggtccctgcgtcaaagctcgagcgggtgtgattccagggaggtcatctgctgaggggtgtcgggagatgctgggaaggggcaggcatgctgtggaactgggccgttcctgcctctcgctctgcctccttgccctgctccccgtctgtaacacctgagctgtacctgggcaagtgtgagtcattttttagcgttgacgtctctctgggaggagtgttcccctgtcaacggctggagttttgtcctcaaggcaccctttcgtggccccattggacagacagggacactgaggcctccggaacccaccatactgaattgtcaagcaatcaaaagacccctcacccacctgggctgacccctgggggaacggggatgaggaaactgaggctctgggggcacctgaccgtcggtccaaggccacacagtgggaggggccgtaccgcggggcctcagacctgcacccgtctgcagagccaccccaccattggagcagggttcaagtcccccccccggccccatattccctgcaggggtccaggcactcacccaccacctgtatcccaggctgctccagcctctggccagtgcccgattcacccaggtgtttgtgtggctggagacagccctttgttcacggtttccataggtacagcgtccctgagcggcccctcctctgcccctcccagcccttgcctgtgcaggtcctgggtccggcccatccagggagcttgttatgtttcaaagttggcgccctcggacctgccgtagtggcagagggcacagcccatgcaaaggccctgagagaggacctcgcctggggtgttggagaaacaggaggaggccagtgtgactggggcagagccacagcgagagtcaggcaggttatgagcagggcctgtattcctgcatctgatcccccagcagccctcaacttggggagttacgacccactcctgttttacagatgaggaaactgaggctccgcagaattgaaaaactggttcaagatatcatgcgggtggcagagctcaaacctagattggtccaagctccgccaccactgggctggcccccctggggcctcccaaggcgttcatcgcctccagctgagctgggactggctcaggaaataaactctggcggcctgtttacacctggggctgctcctccaccagcccttcccccctccatagagaaggtgctgggaaatgtgaggatgcagagaaaacagattctgtcctgcctctgtccccacttccctggacaaacattggaagcattggcctctttctaggccttagtttcccatcccaggaaatgggcctagttcgacttcacagaaaaggccaggaggcggcaggtgtccttcagatcacctgccaattaccttagcagcgacggtcccagttcacagctggcaaaactgaggccaagtccccacaggccacttgggagctcattaggggccagtctgggtgggcccgggctggcctaggcctggctccccgccaccgatgcctggaccgatgcctggtttagctagaagctacagtcatgcccacctccgcacggctggcccagctgcccaccgcctggaatgccctcagggttctggaatctggcctgagcacctgcggccctacagttaaagggggcagagtccactagagtccacatgggggatgggggtgctggtcccagagcagagccccacgccaaggggggcaattgagactcaatctgtctccccctaacctatacagcgagagtgacagagagacagacggaaactgaggcaggaatgtagacggacaggcggtggggtgcagaagcattaaggggcgggagagacagagggcggccaggtggcccccgagatgcgctgaaatggggggcgccccggcactgctcgctcacctactctcgaagcagagtccgtacgtccaaccgtcgggggtccgtccagccgcctccgtgggccggggccgttgccgcggcggtgggagcagcgccggagccggggccggggccggggcggggcgggcagcgcggccccgccctccactcgcctcgcccctcggcaggccacgccctccactcgccccgcccgcgcggaagggaccggagagttgccaggcctggggggcgggccgagcgctccggattagccaatgacagggcgggcaatgtacgaaaaggccaatgggagcagggcactgcgacgggggggaagtggggggaaggggcggagcctgggggcggggtcaggcggctctgggggattcctccggaatcgcgaaggggcccggatgcgggggcgaggccgtcgtgggggtgccggccacagaaaagggaagagataagagtacgagacagacagagaacctggggagggaggcacagagacaccaacaggaagagaccagagagccaaaaggcaaaacagaccaaccacgtggttctgcacgggccccttcctccttctggggctagtttacccgcctgggtaataggaatttcggcagaagcgtgtttctcaaagtacggcctcggggaacccttcgcgtcagaaagatctgagagtccattttaaaatgcagattccaactaggtgtggtgcctcacgcctggaatcccagcactttgggaggccaaggcaggaggatcccttgagcccaggagtttgaaaccagcctgggcaacctagggagaccctgtctctacaaaaaaaaaaaaaaaaagaaagaaagaaaaagaagaagatcaaaataagttaaaattttaaaaatacagagttctgtgccacaagaagggatgaatctaacccagggttgtggggctatagatgaatctttggggtgaggtggagggctcctggagacctcatcagaggatccccaggtccagcctcgatttccgtaggaatgagcctgcaggacacacaggagcctcccggctgcgcagcgccagctggggtcccccggggaggatgcagctgtgagtcctgggaaccaggccctggagctgctcccaggtcccctgcagcaccatttccgccctgcagcccaactctgggtcccggttgcagctagggcctagggagcccatagcaacctcgctgcttcttcctccaggaagccagacaacaaattgttgagggcctgttgtgtgtcctgacctgcacacgggattcaggaagaccgaggcacaggcctcaggaggcaaaagtaagttaaatatctcattggctgggcccggtggctcacccctgtaatcccagcactttgggaggccgaggtgggcggatcacctgaggtcaggagtttgagaccagcctggacaacatcgtggaaccccgtctctactaaaaatacaaaaattagccgggtgtggtggcacatgcctgtaatcccagctactcaggaggctgaggcaggggaatcgcttgaactctggaggcagaggttgcagtgagccaagatcgggccactgcactccagccggggcgacagagcaaaattccatctcaaaaaataaaacatacaaaaaaaaaaaattagctggtcgtggtggtgcacgcctgtagtcccagctactcgggaggctgaggtgctagaattgcttgaaccccagaggcagagattgcagtgagccgagatcgcggcactgcactccagcctgggctacaaagcaagagtccatctcaaaaaataaaaaataaagcaaaaatatgaaaaaattagccaggagtggtggtgcacgcctgtagtcccagctacttgggagactaaggcacgagaatcacttgaacccaggaggcagaggttgcagtgagccgagatcgcgccactgcactccagcctggacgacagagcgagactctgtttcaagaaacaaaacaaaacaccttcttatttcattttggaggaggagactgaggcccagagagaggaagtaacttgcctgaggtcacacaggcacaaggtggtagagtcaggagtgactgtcccatttcacagatgacgaaatggaaccccagagggaggaagggataggttccaggccacacagccagatgaggcagagatgggattaggacctgattaggtctgactttggtgtggtgtgtacagctcctctcgcaaccccagcatcaagggggtctccccatcagggcaggaggactggaggcatctgagcctagcatgatttcaccttttttctttctttctttttttttagacagggtctcgatttgtcacccaggctggaatgcagtggtgcagtcacagcttactgcagtctcaacttcctgggttcaagcaatccttctgcctcagcctcccaagtagctgaaatcacaggtgtgcaccaccaagctcggctaatttttatttttttaaatagagatagggggtgtctcactatgttgcccaggctggtctcgaactcctagcctcaagcgatcctcctgcttctgcctcccaaagcgctgggattacaggcaagaaccaccacacctggtctcttttctgtatcagataagaaggttgggactcgggagggctagggttcagtgggtgttaggggtgggggagggatgatcttggccgggaatgcaggcttactgggtgatggggcttagtgagaatagggcctctgctgggattgggctctgtctacagtaagggtgcagcccagggttagggttcagcctagagttggagactctatcgagggtccaggctcagcccagagtcgggatttagaaggggtcgcaggctctattccgtatcagacctcagcctagaggggggctcagccctgagttgggagctcaggtcgatggagactctattggagtttgaggcttggctcaggaccagggctcaaagacagatcagaggctctatccaaagttggggtctcagcccaggtcccagctctactgggattgaggtttagcccaaggcgggagctcagcccagtgtcgcggttccttaggaggtcggggatcgatccagagttgggggctctataacccggtaaagctcagccgggtgggagtcgggtccggagtcccgagggtccgggagtcgccgccgcgccgtttccgatcatgcccggcagagggcgcgctctgcccacagcccgggctggcggcgccttcgcttccccggaacccgcggccggggcgggcgggatctgcgtgcggggcggggtctccaggcccaagtctccccgcggagcctagacccaccagagtcacccgcacccccaggccaggcctcgcaccctgccgggctgtgcaacctgcagctagcgaccctcttctccgggcctctgccccggcccagtgccatgggatcccgtttgggggagctatggaaccttgaatgtggggtcgatgggactccgtttgcggggatgatgagaccctggttgggatgggggatgggattccgtttatggggtgatgggatcctggttgcggggggacgatgatatcccagttgaggggcttgaaggaggcggcttattctgttctgcaggagcctgtgggactcgtcttgggggccagaacgcactcccctcccccttacccctctcccagtggtaactcctacacgtccgccatctgtccccaggccatctgtctgtctctgcaagaccctttccaaggccgcttgagaaagggagtgggtgggcgggcccagagcagggacagaaggaggggagcgaatcttgctggagcgctcacctctcaaagtccaggcccgggggcctcctggaactttcccaaggtcactggaagagagggaggggctgtcaccctccctggggtcgggggctgggcatggggtcaggggcgcactcctttccccccaaccactaaaccaactccctctatcttcctgctgccagagaaggagccagcctgcccccgaaggagggtggatttacaagtgtcagccgtgcagacgccagcctgtgtcagccgggtgtctggggaggtagacggtgcgtgtgtgcccgtgtgtgcccctgtgggtgggtgggtgggtgtgtttggggagagggcagcccgatcttctgctgcccctggggatagagcgtccttagtcatcccgggcaggaaaggaaacttcactttttggaacctcagtgactgcatctggaagatggatgcagtgatcgtagcagattcagagatttgtaaaactgcaaggacagggtgctgggactcagcactcttgcattgtctgatggcctcaataagacaccggcagccgggcgcggtggctcacgcctgtaatcccaggactttgggaggccaaggcgggcaaatcacttgaggtcagttcgagaccagcctggccaacatggtgaaaccccacctctacagaaaatacaaaaattagccaggcgtggtggtgagggcctgtggtttcagctacttaggaggctaaggcaggagaatcatctgaacctgggaggttgaacctgggaggttgcagtgagccgagattgtgccacaggactccagtctgggtgacaaagcaagactctgtctgaaaaaaaaaaaaaagaaaaagaaaaggaaaaagaaagaaaacagctgagaatcgccgcacccagagatcagaaaagctagggtatttatcccctcatgttcaaccagcgttgacaaaggactactcccaggaaccttagctctgggcagagagaacgccccaaaacagggagatatgtctgtggttctgagcagctgctacaggacatgactcagtgtgggctgatgagagccagccccggggcttagtccagaactacagaggaggcagcaccagcctggggaaataccagctgggatctgctaaggactggtatgagatctgccttgtggcagaagccaggggaggagaacagagctaagtccgggaaggagactgaatactggggccccttgatcaaactgtgcctgaagcccctctagactaggcaaggacatttctctctctctctctttctctctctctccctctccctctctccctcctctctcctctctctctctcctctcctctctctctctccccccccaacccccgtcttggtggagtctgactatgttgtccaggctggtcttgaactcctggcctcaagtgatccacctgcctcagcctcccaaggtgctgggattacagacatgagcctctgcgcccagccctaacaccttgtattttaacagctcggtgatacattcaggtcctctactggactgagggtcctggaagagcaggtctgggcccatttttctcctgccatgttcctggtgcccaaaacagggcctggcacacagtaggtgctcacttaaatgagtgttaagcaatcaaatgagatttcttttctcaatttgtggttgagaaaacaaagcccaggaagggagcagacttgtccacaaagcaagtgggaatctgggtcaggattcaaatcagacttatgtggctgatggcccagcatgtcccttcacccgtggagcacttctgtcgtccgccctgtctttcctcaccatggctcggtctagccagcctctctgctccttatctccctgaaatgccccccacccctgccacagcttccagggagaccccacagggcccaggcaatccgggagggcttcctgcaggaagggctcctagacagcgcggtgtgctgagagctgtgtctgactgtgaaatgccggttgatttgctcatctacatctttgcaggaggcacagggcacaggtgggaaatattcccacagctgtcctcacacttacccatctgtcacgatgacttcatcagagcctgagctgggggtgtggctgacctcatcttcccacctcccggagtgtggtgagcagaatcctgacctgttaaaagtattaactcagcagccccacgcctggcctgaatctcaggcagcgagctccttctgctcattttctgagtctctgcctgctgttaaagttccccttttagctgataaggaaaatgagcccatagagtgacttcccttgccccggagacacacagcatgtgctgagagctggactggtctctccttggccactgccctgcctcttcagtgcattctctgcaaagccactagagggtgcctgtgagcacctgactcaggtcctgttcctcctctgtccacagccctctatggctcccacctccctcaaggtcaagacccaagtccttcctgcagcccatgacggcccgcacgacctgtcccgtcccctccttcccctcccctcctccctctctacccctagctcactctattccagccacatgggcctccttgctattcctccaacatgccaggtgtggtcctgccccagggcctttgcatgcatggtgcccatagcctgggatgctgttccctggagatcttcatagagcacttgctctaatcagctcgggatgagcaagggagagggagaaaaccactcacagagggataggggaatgctaatgaaacgctctttttttttttttttttttttttaagatggagttttgctctgtcgcccaggctggagtacaatggcgtgatctcggctcactgcagcctctgcctcccgggttcaagcgattctccttcctcttcctcagcctcccgagtagctgggattacaggtgcatgccaccacatcaagctaatttttgtatttttagtagagatgggtttcaccatgttggccaggctggtctcaaactcctgagctcaagtgatccacctgcctcagcctcccaaggtgctgggattacaggcgtgagcccctgcagccaaccgatgaaaacttttctagctcccttcagctctcctcctgaagaaagaccttcagcccacctggtgagtcatggtcatggcggggcctctgtttccccatgtgtaagagacaggtaatgcttcccaaatccgtgccaatggcttctcatcttttcttccatttccccatatccacagttatctattttcctttaaacctcacatctgaaatatcagtcaatgtattttaaaaatcttttttagccgggcacggtggctcttgcctgtaatcccagctctttgggaggctgaagcgggaggatcacttgaggccgggaggatcacttgaggccaggagttccagaccagtctgggtaacataaaaagactccatctctacaaaaaaaaaaaaaaaaaatgcaaagattagccagatgtggtggtgcacacctgtggtcccagctactcaggaggccgaggtgggaggatcacttgagcctggaaggcccagtgatctggtttgcttctgtgtcctcacccaaatctcatcttgaattgtaatccccacgtgttgagggagggaggtgattggatcatgggggcagtttcccccatgctcttctcctgatagcgagtaagttgtcatgagatctgatggttttataagtgtttgaagtttctcctttgtccagccgtcttgtgaagaaggctgcttcctgtcccaccatgattgtaaatttcctgaggcttccccagccatgaggaaccaagtcaattaaacctctttcctttataaattacccggtcacggtggctcacgactgtaatcccagcactttgggaggccgaggtgggcagatcacaaggtcaagagatccaggccatcctggccaacatggtgaaaccccgtctctactaaaaatacaaaaattagctgggtgtggtgggcgcctgtaatcccagctgctcgggaggctgaggcaggagaatcgcttgaacctgggaggcggaggttgcagcgagcggagattgtgccattgcactccagcctggacaataagagcaagactctatctcaaaaaaatatataaataaacaataaataaaaatacaaaaattagccgggcgcagtggtgcgcacctgtaatcccagctgttcagaaggctgaggcaggagaatcacttgaacctgggaggcagaggttgcagtgatcagagatcacgccactgcactccagcctgggcaacaagagcgaaactccatctcaaaaccaacaacaaacaaaaaacaaaacaaaatatgacttcagagagtgtttggcgtggtatgaaataacctggaagcccagttgcacagtgacccctttgaatatctgttctgtctttctcaagtctcaagtgggtcctgccaggggcgaggggtcgagggagtggttgttaagtctctcccacctgtcattccttccgtcactacgggatccatttaagtcaatcagactaaattatattttcagttaccttcaatctatggtgagagaagctgattttcctttcacctttgtgatttaaaaaaaaaaggattattatttattttttttttagagacagggtctcattctgtcacccaggttaaaatgcagtggtgccatcacggctcactgcagtctgaatgtattggtctgttctcacactgctataaagaacgtccctgagattgggtaatttatttatttcttttttatttgtttatttatttatttatttgagacggggtcacactctgtcgcccaggctggagtgcagtggcgtgatctctgatcactgcaacctctgcctcccaggttcaagtgattctcctgcctcagccttctgaacagctgggattacaggtgcgcaccactgcgcccggctaatttttgtatttttatttattgtttatttatatatttttttgagatagagtcttgctcttattgtccaggctggagtgcaatggcacaatctccgctcgctgcaacctccgcctcccaggttcaagcgattctcctgcctcagcctcccgagcagctgggattacaggcgcctaccacacccagctaatttttgtatttttagtagagatggggtttcaccatgttggccaggctggtctcaaactcctgacctcagatgatccacccgccttggctcccaaagtgctgggattacaggtgtgagccaccacacccggccaatttttgtatttttagtagagatggggttttgccatgttggccaggctggtctcaaactcctgacctcaggtgatcctcttcccttggcctcccaaagtgctaggattccaggtgtgagtcgccacgcatggcctattttttttttttttttttttgacacagagcctcgctttgttgcccaggctggagtgcagtggcatgatctcactgcaacttctgccacctgggttcaagcgatcctcctgcctcagcctcccaagtagctggcattacaggtgcctgccaccatacccggctaatttttatatttttagtagagacggggcttcaccatgttggccaggctggtcttcaactcctgacctctagtgatctgcccacctctgcctcccaaagagctgagattataggcttgagccactgtatctggcctgtcttgttttctgctgtgttctcaggacctagaacaggtgagtacacagtaggtgctcaataaatgtttgtgaaataaacaaatgcacccatgtctgttcctctttatggcccattgtgcttggaagaatattgacacctccccgtccaaagatgtccacatcctaattcccaaatcctatgcatatggtacttcagttggcaaaaagcactttgcaaatgggattacattaaggatcttgagatgaggagatgatcctggattatctggataaacccagtgcaatcacagggtgcttataagaaggaagaaggaggctgggcgcagtggctcatgcctataatcccagcactttgggaggccgaggagggtggatcacctgaggtcaggagtttgaaccaagcctgcccaacatggtgaaaccctgtctctactaaaaatacaaaaattagccaggtgtggtggtgggcacctgtaatcctagctgctctggaggctgaggcgggagaatcacttgtgctcgggaggtggaggttgcggtgagccgagattgccccactgcactccagcctgagtgacagagtgagactccgtctccaaaaaacaaaccaaacctaaccaaaaaagaaaagatggggcccggcgcagtggctcatgcctataatcccagcactttgggaggccaaggcgggtggatcacaaggtcaggagttccagaccagcctggccaatatggtgaaaccccgtctctactaaaaatacaaaaaaaaaaaaaaaaaaaattagccaggtgtggtggctcgcatctgtcgtcccagctactcgggagactgaggcagaagaatcgcttgaacccagaaggcggaggttgcagtgagctgaggtcacgccactgcactccagcctgggcaagacagcaagactctggagactctgtcaaaaaaaaaaaaaaaaaaagaaggaagcaggaaggccaggttcagagaagtagacctgatcgataataggaacaaccagggtgaggtagcttgagaaagactccatcagcccttgctggcttggagatggaggaaggggccatgagccaaggaatccaagaagcctctgaagactggacatggtggctcatgcctgtaatccctgcactttggaaagccaaggcaggaggatcctttgaggtcaggagttcaagaccagcctggccaacatagagagaccccagtctctacaacataaaattaaattaaattaaaaatgaagcctctagaagctggaaaagcaaggaaagtagttctcctctagagcctccagaaggaatgcaatcctgcagtcaccttgattttagcgtaagagaactcagaaccccaaggaggccaggtgcggtggctcatgcctgttattccagcaatttgggaggccgaggtgggcggatcatctgaggtcaggagttcaagaccagcctggccaacatggtgaaaccccttcctctactaaaaatacaaaaaaaaaaaaaaaaaaaaaaaaaattagccaggcatggtggtgcacgcctgtaatcctagctacttgggaggctgaggtagaagaatcacttgaacccgggaggcggaggtggcagtgagcagagaccacgccgctgtactccagcctgggtgacagagtaagactctgtctcaaaaaaaaaaaaaaagaatttgagaattctttgccttgagtttcctagtggcaatcacagttggttttgccgactctcttccttagcaaccagcaaccccaattttccttggggagcagccctttccccacttctggtctcagtagttagctgactccaccctcccccagctgtcctggccaatcagagcactacctcttctgggggttgctatgattggttcaggactgagccagtgagaatgagaagaggaggctctgtgtccctacccgcaggatatagagctgggaggatggaatttggagccactgaggggcatccttgccactaagaaaggggagcccacctcgggggtgaggctgggagaagccagcccagaagaaagcagagttgagagatggcaagagaaaaattgctaatgtcatgagtcaagttcctggatccaaccatacctgaagctgtaatattgcacttgtcaatgagcctgggtagtaattttccttttttttttttttttttttgagatggagtctcgctctgtcgcccaggctagagtgcagtggcgcaatctcagctcactgcaagctccgtctcctgggttcatgccattctcctgcctcagcctcctgagtagctgggactacaggtgcccgccaccacgcctggctaattttttgtagttttagtagagacagggtttcaccgtgttagccaggatggtctcgatctcctgacctcgtgatccacccaccttggcctcccaaagtgctgggattacaggcgtgagccaccgcgcccggccttattttttttttttaaatttttttttttgagacaaagtctcattctgtcaccgaggctggagtgcagtggcacaatctctgctcactgcaacctctgcctctcgggttcaagcgattctcctacctcagcctcctgagtagctgggattacaagcatgtgccaacatgtccagctaatttttgtatctttagtggagacggggtttcatcacgttggccaggctggtcttgaactcctggcctcaagtgatccgcccacctcggcctcccaaggtgctgggattacaggcgtgagccaccggacccggccactttttcttttttgttgttatcgtgggagtggttgttttaatgactggcaaaagaatgttgataagcgccttttctgcgtaatgtgtaagatcttggaatttctggaatagctatggggggaaagcgctaggacctgagagtcactcccaatttattattttattatatatttgtcatagagacgggagtcttgctgcgttgcccaggatggtctcaaactcctggcctcaagagaacctcctgcctccgcctcccaaagtactggcattacaggcatgagccgcagtgcctggcaggttccacttccaattgttaagagtctgaagccagagacagttggttctttcatgctcaaactgggtagcgatggtgcactgcaggcgagggtgcctagcaccatgagtgcagtgaggtggccctgtggcaaaacccaggagcctggagggtccaaaaaggccacaatagactgggggagatttgaagagaaagcctgaaaaactcaaggtttcaagtatcagcaaaaccatgggagacggccaggtgaaatggctgacatctgtaatccccgcactttgggaggccgaggcaggtggctcacctgaggtcaggagttcgagaccagcccggtcaacatggtgaaaccccgtctctactaaaaatacaaaaattatccaggcatggtggcaggtgcctgtaatcccagctatttgggaggctgaagtaggagaatcacctgaacctgagaggcggaggttgcagggagccaagattgcaccattgcacaccagcctgggtgacagagcaagactccatctcaaaaaaaaaaaaaaggctggtggctcacgcctgtaatcccagcactttgggaggccgaggcgggccgatcacgaggtcaggagatcgagaccatcctggctaacacagtgaaaccccgtctctactaaaaatacaaaaaaaattagccgggcgtggtggtgggtgcctgtagtgccagctactcgggaggctgaggcaggagaatggcgtgaacccgggaggcggagcttgcagtgagccgagatcgcaccactgcactccatcctgggcgacagattgagactccgtctcaaaaaaaaaaaaaatggaagaaggggagcttccacagttaccggttgtagcttaatcctagaaagcacttgggcattaaatagtcaggtaaaccacgcacacatccaatgttccagtgattccatttctagtcatagttcttagagaaatactttgccaagtgcataaagagagaggaaaagacttttcatagtagcaccttttgtaatattaaaaaccaggaatagagcggggtgcagtggtagtcccagctagttgggaggccgaggcaggaggatcacttgaggccaggagttcgaggctgtggtgtgccatgattgtgtttgtgaatagccactgcactccagcctgggcagcataggaagactgcatctctaaaaccaaaaccaaaaccaggaattaacctaaaagttcattgacagagtggggcacagtgcctcacacctgtaatcccagcactttgggaggccgaggcaggtggatcacttgaggtcaggagttggagaccagcctggccaatgtggaggaaccccacctctactaaaaatacaaaaaaattagtcaggagtggtggcgtgtacctgtaatcccagctactcaggaggctgaggcgggagaatcacttgaacccgggagtcggaggtcgcggtgagccgagattgcaccattgcactccagcctgggcaacacgaatgaaactccatctcaaaataaatccataaataaataaaataaatatttaaaaaattaataaaataaaatattgagtgaaaagagcaaattgcaggatgatatgtaccttatgagaatattaagatttatttttagtgtgcaaaattacactagtcacgttcatggatgggtgagagtttatacacataagaatgtagaaaaatgcgtgactggaggaggtcaaaggccactgtaccttgacttccagtatttccattcttacttacaaaacaaaacaggcctgaagcaaacatgagaagggttaagcaccgctggtcctgtgtggaggaaacacaggtgcttgctatatttgtctttgcacttgtctttcctttttactttcctcaaaattagaaaaaaaaaatgtttataacaaagaaagttatggaggatttaaataggtggagaggaagcaggagtgtgttccagcagagggaccagcttcagcaaaggcttgggggcagcagtgagcacggcctttgggagataagaaaacctattgcagaggctgggcatgttggctcatgcctgtcatcctagcactttgggaggccaaggtgggaggaacgcctgagatcaggagttcaagaccagcctggccaacatggtgaaacccatctctacttaaaatacaaaacttagccaggcgtggtggcatgcacctgtaatcccagctactactcaggaggctgcggcaggagaatcacttgagcctgggaggcggaggttgcagtgagccgaaatcacaccactgcactgcagcctgggcgacagagtgagacgctgcctcaaaaaaaaaaaaaaaaaaaaaaaggaaaaaacaaaacctacagcaattgttctatgtcctgagggcacacttgaatccttttcccagcccccagctctagaccgattcattcataatctccagtggaggggagggatggaaggtgttggttggaatttgaaactccctgggtgattgtaagcaccagggcaggactaggagccatgagatacacggtctagtgcagtagccacttaaaacatgtttgctgagtggtgactgaataatgcagggagagtgaaaatgaaggctacagggacaggctggcaggggccagcctgtagttgggacttgggaggggttaggcagtccagatccagttcccttaactgtgcttaacaaattacaaatattagcctaagagaattccgggtgataaaaaatgttctaaagaaaatacaagcgctgggtgcggtggctcacgcctggaatcccagcactttgggaggccgaagtgggtggatcacctgaggttgggagttcgagaccaccctgacccacacggagaaaccccatctctgctaaaaatacaaaattagccaggtgtggtggcacatgcctgtaatcccagctactcgggaggctgaggcaggagaatggcttgaatccgggaggcggagcttgcagtgaaccggagatcatgccattgcactccagcctgggaaacaaaagcgaaactccgtctcaaaaaaaaaaaaaaagaaaatacaagcaccaggtatggtggtgtgctagctacgttccagctacgggggaagctgaggcaagaggattgcttgagtccaggagttcaaggctgtagtgagctgtgatcatgccactgcactccagcctgggcgacaggggaccctgtctcataaaaaaaaagaagattatgatgatgatgtgatagaaaacaacttcgtagcttctttagtcagggcggtccgggagggcttcctggaggaggtaacattggagctaagccctaaaggttgagaagctagccctaaagatggcaaaggatgggtgtagtggtgcgcgcctgtaatcccagctactaggtaggctgaggcaggagaattgcttgaatctgggaggcggaggttgcagtgagccaagatcgcgccactgcactgcagcctgggcaacagagcgagactctgtctcaaaaaaaaaaaaaaaaaaaaaaaagaatgggaaaggaggaccaggcagagagaacaagcaaacaggcagttccagcacagggtgaccagggctgttttgggggatgcccagggtgtcagaagatctgaggggtgggcctggttcaggcacaggtcaggcaaggcttccggaaggaggcagctggaatccaggtctgacttatctctgtccagccctgtcactgtgagcagaaaggccaccaccccgcccccagtgtccccgagggaaatggcacctgaatcaaggcgtttatttttttccaagggagtgaaagtgaacatgatcatctctccatccatccgctttttaaatttagcccagtgcacatggaacttggttcaggaaaaacaagaagttataaaaatataattccattcttcatcacgggcagcagagggagcgaggcggggagagacaggggaattcagaggatggggaaggcagaaaactcagaaacagcttcagaggcagggctgcctagaggggaaggtccaaggccccagccccaggcaggcatcaaactcacctcctgccctgccctctacataggtcccacctcctgcctcgtctccatccttccctcccctctgcccaagggctcttccccagcctctcccaccttctccagtcccgcccccaacagctgggaccaaactggccaatctaaaatctagaatccgaccaggcgaggtggctcacacctgtaaacccagcactttgggaagccaaggcgggtggatcacctgaggtaaggagtttgagaccagcctgggcaacatggtgaaaccccgtctctactaaaaatacaaaaattagctgggtgtggtggcacatgcctgtaatcccagttactcaggaggctgaggcaggagaatcccttgaacccaggaggtgaaggttgcagtgagcaaagagattgcaccactgcactccagcctgagtgacagagtgagactctgtctcaaaacaaacaattatatatgtttccagccatgaggctggaactgccaggaagacagggccaagtctgttttttgtttgtttgtttgtttttctggctgtaagtttattcagtgcaaactaatcctctccaattttaccgaggtggctgaccatgtccaccaccaaatccacctctaaactggaattcggttgctggcccagccccagccttggcttcctggccagcaccagggggcacagcgccccacctgtgggtctctgtcagcttcccctcttgggagtcttggagggcactcaccctccagacgtttaggccaaggtctaccagtctctggacggctgcggcatagagtggcaggcacactctctgagggcagctggaggtcatcatggagacactagataccctcattggtaaggtaccagtagaaacgtctccagttggccaggcatggtggctcacgcctgtaattctagcactttgggaggctgaggcgggcggatcacaaggtcaggagttcgagaccagcctgaccaacatggtgaaacccctcctctactaaacatacaaaaattagccaggcatggtggtgggtgcctgtaatcccagctactcaggaggctgaggcagaagaatcacttggacccggaaggcggaggttgcagtgagccgagattgcgccactgcactccagcctgggcgacagagcgagactccatctcaaaaaaaaaaaaaatgtctccaggcaaattgttccttcacatgacctcatgatctgagagactgtttggcctttatgacgtgtaggttgggcacattcctgtctgccagctctgggtgcttaggcaggtgggcatccttcttggccaccatgactccctccttaaaaaggagttcatagactgggcacgggggctcacacctgtaatcccagcactttggaaggctgaggcggggggatcacttgaggtcaggatttcgagaccagactggccaacatggtgaaaccccgtctctactaaaaatataaaaattagccaggcgtggtggcgggcacgtgcaatcccagctactcaggaggctgaggctggaaaatcacttgaacccaggaggcggaggttgcagtgagccgagaccacactattgcactccagcctgggcgacaagagcaaaactcaagtcacagaaaaaaaaaaaaagagagagagagaagttcataaatggcaatccggttctcctcagccatcaacatctctgcaactgtcagggccggggctggaaagggggccgagtctgcttttgtctccactgcttctttcccgagtacatgaatctccggctaccactgaatctctctgttctaggctccggggtccctaagacccctgagtctggggtcaactctgctgaagtttggagggccatggtggggataccttctcagccagaaaaacacaagatcccaaatatcagcacccccctttcttgaaaccccccagaccctggacagcaggtctggatcctgtctgtcagcttcatctctgttgctaggcaaccccagtgctctcctccacccccatctccctgcattcacacttatttcttggtgaaacagacaagctcttcccagccgcctcaccccaagtctgtgcacccctgggcactctctcagaacaaatttgccctctggatgagggtctcacacaaagctggcccctccccacctcccatcctcccattccgcctcctgggaatatatatatataatttttttttgagacagagtcttactctgttgcccaggctgcagtgcagtggcacgatctcagctcattgcaaccttcgcctcccaggttcaagtgagtctcccgcctcggctccccgagtagctgggattacaggcatgtgccaccatacccagctaattttgtatttttagtagagatggggtttcaccacccgcctcagcttcccaaagtgctgggagtgagccacagcgcccggccacctcctgggaatgggaatagatgtctatagtagttcccatgcttccaatttcccatgttctaaagtcagaagcaccttccctatgttggctggcttcactgtcacccatggaggtggcacagccattgttgctacacagaggaggacactgaggctccgagatgcagagttgactgcccccaatcgcacagcaagggttgggctgctgaactcaaatccggagccctgtggggactcccactcaaagccgcagggggtcccaggccaggtgctgtgtgacctcggggaggcccctttccctctctgttcctccccagccagccagggagaaggtgaagccttaaaatccatttgaattccatctccctgggccaggtgttctggcacacgcctgaatcccaacgctttgggaggctgaggcgggaagaccccttgaggccaggagttcaaaaccagcctgggctatgtaacgagatcccatctctacagaaaatttaaaaattagctggcatggtagcaggcaactgtagtctcatttactcaggaggctgaggcaggaggattgctagagcccaggagttcgaggctgcagtgagctataatcgcaccactatgaggcgctccagcctggacgacagagcgagaccccgcctcaaaaaaactcataaactccatctcccgtctctgcctcagtacctgggaggcaggagcaggtgggggatctggaagtagcagagaggggggtgccgcaggagagtggggagtgtggagcccagaggttggcagccccgggggagatgtgcacccagagcctgcgagacggaaatagaacgtcagagacagaggagagggagagacagaggagagggagagatagaggagagggagagactgaggagacgcagagacagaggagaggcggagtcagaggagacgcagagacagaggagaggcagagacagaggagagggagagacagaggagaggcagagacagaggagaggcagagacagaggagagggagagacagaggagaggcagagacagaggagacgcagagacagaggagagggagagacagaggagagggagagacagaggagaggcagagacagaggagaggcagagacagaggagagggagagacagaggagaggcagagacagaggagacgcagagacagaggagagggagagacagaggagagggagagacagaggagaggcagagacagaggagaggcagagacagaggagagggagagacagaggagaggcagagacaggagacgcagagacagaggagagggagagacagaggagagggagagactgaggagacgcagagacagaggagagggagagacagaggagaggcagagacagaggagagggagagacagaggagaggcagagacagaggagaggcagagacagaggagaggcagagacagaggagaggcagagacagaggagagggagagacagaggagaggcagagacagaggagagggagagacagaggagaggcagagacagagaagagggagagacagaggggaggcagagacagaggagagggagagacagaggagaggcagagacagaggagaggcagagacagaggagagggagagacagaggagagggagagacagaggagaggcagagacagaggagagggagagacagaggagaggcagagacagaggagaggcagagacagaggagagggagagacagaggagagggagagacagaggagaggcagagacagaggagagggagagacagaggagaggcagagacagaggagagggagaggcagaggagaggcagagacagaggagaggccgagtcagaggagaggcagagacagaggagaggctgagtcagaggagaggcagagacaggagaggtgggggaggaaggccagaccatccccctgtgcccagccagtgccagatccacagtggcgtggggaagggagaaagtggagaagagggaggggtggggaagaaggtggtgggtgaagctggtgccccatgggaggagcagagacaaaaagatacagaagcagagagacccaggtggggggtcgggggaagacagagaaagagagggctggggagagagagagaagaatgagaaagggcggggagagagggggaaagagagaatgagaaaggggagagagagaaagagagggggaaggaaagaggagggagagagaaagagaaacggagggagaaaggggggagagggagagagagagggagagagggagatgtagacacagagagacgtgtagagacccagagatacacacagagataaggagagacggagagatcatcatggagaactgggagagagggagagagatgtggccagccctagacactcagagtgctgttcggatcataatcgcctgagtagcttttgggggttcttttagcaggcatcatggggtattcgggccagtcttggccagtgctggagcctcggggtctcccagagtccaccccacagcccctcatgttcaggctggggtggaagaaacccagaactgggtgggcagtggccagaggggctcagaaagaggagctggaagcaaagctattgaaggcaattgattgccaggaagaaaaggctttggggaaaagcgtttctggtacagggaccagcatgggcaaaggccgggtgggggtgaaataaagtcagtgcacttggacatggcaagattgtcctgtggctcatgttggaatgggtgctgtggaggggataggatggagatgacgcaggaaaggcctccagggtcatgtaccccaaaatacaggcattggggcccagagagtcctccgtcttggtttggctcatgaggagccaccaggctgtggagaagtaaaactggacacagctggacactgactgaggggtcagggctgggacagagggacaatcctggggagctcagagttgggaagagagtgggggcaccagacactggtccctgggataaaacaggctgagaatcccttatccaaaatgcttgggatggctggatgcagtggctcatgcctgtaatcctagcactttgggagtctgaggcaggcagatcacctgaagttgggagttcgagactagcctggccaacatggtgaaaccccatctccactaaaaatacaaaagtatggtggcgcacacctgtaatcccagcactttgggaggacgaggcgggtggatcacctgaggtcaggagttcaagaccagcctggccaacatggcaaaaccccgtctctactaaaaatacaaaaaattagctgggcatggtggtgggcacctgtaatcccagctacctgggaggctgaggcaagagaatcgcttgaacccaggaggcagaggttgcagtgagccgaaatcacaccatcgcactccagcctgggtgacagagcgagattccgtctcaaaaaaaaaaaaaaaaaattagctaggggtgctgacgcatacctgtaatcccagctacttgggagtctgaggcatgagactcacttgaacccaggagacggaggttgaagtgagtcaagattgcgtcattgcgttccggcttgggggacagagtaagactctgcctcaaaaaaaataaaaaataaaaaaggccgggcgcagtggctcacgcctgtaatcccagcactttgggaggccaaggcaggcagatcacgaggtcaggagatcgagaccaacctggctaacacggtgaaaccccgtctctactaaaaatacaaaaaattagccgggcgtggtggcgggcgcctgtagtcccagctactcgggaggctgaggcaggagaatggcgtgaacccgggaggcggagcttgcagtgaaccgagatggcgccactgcactccagcctgggcgagagcaagactccgtctcaaaaaaaaaaaaaaaaaaagaaaaaagaaaaaaaaacctttggaacagaagcatttttccatggtgaagaagtgttttggattggggattttttcggatttcagaatattttcattatacttgccagctgagcatccctaatctgaaaatccaaaatctgaaatgctgcaaggagccttattacctttgagtgccatgtcggcggtcaaagcattttctctttttttttttttaaattattattatactttaagttttagggtacatgtgcacaatgtgcaggttagttacatatgtatacatgtgccatgctggtgtgctgcacccattaactcgtcggtcaaagcattttcaattggagcatgttggattttggattttggatttttggattggggtgctgagcctaggtaataatttaacaagatgacgtcatagcaaatggtggggatgaagttattttagccaggaatggcttctctgaggaggtgacgtttaagctgagacctagaacaggaaaatgagacaactctgaggggatctgggggcacagctgttctgggaagagggtgcatcccatgcaaaggccctggagcaggaccgcacctggtgtattggtgttggagggacagtgaagaggcccgtctggctggggcagagtgaacgaggcgaagagagggaggaggggagggcaggaagggggcaggaaaggttgtaaagagcctggtgggcctctgggaggacttgagctttgacctggagggaggtgggagccagagggctgtaggcaggagaaggacagatctgacttagatttttttcttcttctgcttgaaatggagtctcactctgtcacccaggctggaatgcagtggcatgatcttggctcactgccaccactgcctcccaggttcaagcgattctcctgcctcagcctccagggtagctggggttataagcgcctgccaccttgcctggctaagttttgtattttttagtagagatggggtttcaccatgttggccaggctggtctcaaattcctgacctcaggtgatccaccctcctcggcctcccaaagtgtcgggattacagatgtgagccactgagcctggccctgacttagattttaaggggtcatcttgaattctttcatgtaagaagaaaaataaacatctcaagcaaaagtgaccaaacctaactgtgttcactatggttgtttctcccgtgatatcattctcctggccaggcatggtggcgggtgcctgtaatcccagcgacccgggaggctgaggcaggagaatcgcttgaatccagaaggcggagattgcactgagccaagatcgcgccactgcactccagcttgggcaaaagagcaagactccatctcaaataataataataataataataattctgctaatatcaaccaactcgtaagtaagcaatgtcaagttgactatgactggtgggtctccagctccagcctaggctggatccactgaatttggccaattcaggcctccctctggcctgcacgcctgaccctttcctggggctggggatctccgtcgttgtccccttaccttgagcctctccagcagggaggttggtgtctttcctgaactcgccgactaatgcctcagctctgaagacctaattgtgcatgaaatccaatcaaattatcaggtcctgatgagcaattccctagattatttagctcagtgaagtaaataatgacattagctgtcgcgttctcctgcaagctcattttgtggtgggcctagcgacagaggcccctcattatctgcagtgtaaccagaggcccctgcactctggtcatcctgagtggtgggaagaagggagagggtgggagctcacagtcttcagatattagccctagagggactcagtgctgtcctacaaatggggaaactgaggcccaatgcagaacctgcctgaactcacagacagttagggtctctggaatccatctccacatctgccatccatctgggagaatggtgacccacatgggcacacaccaccccctgtcctcatctccatccttaggtgtgccaaggcagaactcaaatatgggataaaagtgacatgcagagtggaggaaagctccagtatgtacacatctgaagtccttgtctcattcggaggaacaaagagatgttgattaacttccagttattgtaagctaagtatacatggtaagagtgtaagggtgactactcaaaggcagaaatggaatgcataacttccaaatcatgagggggaataagaaaggaacaaagaaggccaggctcggtggctcatacctgcaatctcagcactttgggaggccgaggcggacagatcacctggggtcaggagtccaagaccagcctggccaacatggtaaaatcctatctctactttaaatattaaattggctgggcttgggccgggcacggtggctcatgcctgtaatcccagcactttgggaggtcaaggcgggtggatcacatgaagtcaggagtttgagacccaattttttttacagtttgaagcctggccaacgtagtaaaaccccaatccctactaaaaatataaaattaactaggcttggtggtgggcgcctgtaatcccagctacttgggaggctgaggccggagaatcgcttgaacctgggaggcagaggtttcagtgagccaagatcacgccattgcactctagcctgggcaaaaagagcgaaactcttgtctcaaaaaaaaaaaaaaaagagaaggaacaaagaaaatctggcaaattcagcagaaggttgaagagaagatgaaaaggaagcagcagaaaaaattcatattaactataaaatacaatcaaagaaagtgatgaaaataaagccaaatatgttggcaaacacaataaatataaatgaattaaactgatcgcttaaaagacataggctgtcagattgcatacatagaaacaacaaagaataaacaaaatccatgtgtatgttcttttgaatacacctaaaataaaataatgcatcatcagcaaataaattacacgaaaaaaaaaaagaagagaaagcgatggataggaacctataggctaaaagaaactttaagacatatcaagcagccaggcacggtggctcacgcctgtaatcccagcattttgagaggccaaggcgggtggatcacgaggtcaggaaatcaagaccattctggctaacatggtgaaaccccgtctctactaaaaatacaaaaaatttgcagggtgtggcggtgggtgcctgcagtcccagctactcaggaggctgaggcaggagaatggcgtgaacccgggaggtggagattgcagtgagccgagatcacgccaccgcactccagcctgggtgacagagcaagactcggtctcaaaaaaaaaaaaaaaaaagacatatcaaccaaatacatgtgtgaactgtatttggatcatgctccaaactgtaaaaaaaattatgacacttttgatagaaatttgaggccgatgagatatttgctgatagaataaaattattgttggccaggcacggtggctcacacctgtaatcccagcactttgagaggccaaggtgggtggatcacgaggtcaggagatcgagaccatcctggctaacatggtgaaaccccgtctctgctaaaaatacaaaaattagccgggcgtggtggcatatgcctgtagtcccagctactcaggaggctgaggtaggagaatggcgtgaacctgggaggcagagcttgcagtgacctaagatcgtgccactgcactccagcctgggtgacagagcaagactccgtctcattctgttgcccaggctggagtgcagtggcacgatctcggctcactggaacctctgcctccctggttcaaatgattgtcctgcctcagcctcccatgtagctgggattacaggcccctgccaccacgcccagctaatttttgtatttttattagaaatggcatttcaccatgttggccaggttggtctcgaactcttggcctccagtgatccacctgcctcagcctctcaaagtgctgggattacaggcatgagccactgcaggtggccattgttaaaattttcagcatagtcctccttatcttttaaagataccaattggtcatgcctataataccagctctttgggaggcctaggcaggtgaatcacttgaggtcaggagctcaagactagcctgatcaatgtggtaaaaccctgtctttactaaaaatacaaaattagccaggcgtggtagcgcactcctataatcccagttagaggaaggagaactgcttgaacccaggaagtggaggttgcagtgagccgagattgcgccattgcacgccagcctgtgcaacaagagagaaactctgtctcaaaaaaaaaaaaaaagatacaaattgaaaaattgaaatatttatgagtcaattatatgatacccagtattctttctttctttcccgctctcatttttttctctttcttttttttgagacggagtctcactctgtcacccaggctggagtgcagtggcgtgatctccactcactgcaacctctgcctcccaggttcaagcgattttcctccctcagcctcctgagtagctgggattacaggcgcccgccaccacgcccggctaatttttgtatttttaagtagagacggggtttcatcatgttggtcaggctggtctcgaactcctgacctcaggtgatctgcccacctcgggctcccaaagtgttgggattacaggcatgagccactgcgcccatctcagtgcatattttctggatgaacaaacgtgtacctctccacaatcccgtctttctccaagcctcagtttcctcccctgtgaaacagggtgaatctctcctgtgggaagtgtgaagtgggggcttcatatagacagcctccccgctctcagctcaggcccgggtggagggggtgccctctttccaggattaatggtgtccctgcctctgggattcagattctggctccactgggcattcggatcctgaatcccagaaggtctcagggctgagccccggagctctgagctgaggagaccctgagttagggactgggggcactcagccagtttgtggagggggtctgaagtaccagctagggggaggggtggggaccaggacagggttagagccccagaccccaggggtgccccagagaggaaaattggggagggggatgggctagggagcctctcgcctgcctctatctctctgtttcttccccattctctttctaagtctctgtctctgtctttctctgtctctaggtctctctgagtctctttttatctctgactacctcttttgatctctattggtctcctttctcttgttttctctctgtctctttgaatctacttttatccctgtctttctttccctctctctctctctctaagtctctttgtctctctctctctctctcttttttggcggggggacagtctccctctgtctcccaggctggagtgcagtggtgcaatctcggttcactgcaacctctgcctcccgggttcaagcgattctcctgcctcagcctcccgagtagctgggatcacaggcgcccgccaccacgcccggctaattctccatctctctgagtctccttttatctctgactatctctttctatctctgtctctgttgttctctctctctctaggtctgtgtctctctatctctctgagtctgtatctctgtgggtctcctctgtctctctgagtctccctttatctctgactgtctctgtccatctctctgtgtttctgtctttgccaccttctgcgtgagtctctccgtgtcttttatctgtctgactccagctcagcttctctgtgtgggtctctttctatctctcttggtttctctctttctctcctcacctcctctgtctccccttcccaggctccacttctttcccccacctcttcctgggtccaggtgcgggccccctccccgcctccaccctgccctcctctggcggtgtcagcccttcccgtccaagccagaaaaagcagccaggccagggcagggcagccagccagcctctctgctggggaccccagggactccagcaggactcccgcctccctggcctgatccccaggggctctgcccccccctccccgccgcagaagccctgcctccctcagcgcctcttcccttcctctgcctagaggtcctgtgttattgctgctggcacctgaggctgcagaaaaaaaaaaggaagtcgcagtcaccgtggctcctacttgtccttctctctgccccaagtcctcggagcatgaaaaactccacctccgtgtgagaacaacacagtgggtgcttcatagttgtttgcggaataaacaaacacgtattgagtgcctactgtgtgccaaacagtatttgaggtacaggggacactgtggcattcaagacagacagaagtctgccctcctggagttgacattccagagcaggaggcagataggaacaagcacacattgtaccatgttgagtagtgcctgcctgcaaaaataaattcaaaaattacatacacttcggttgggaccggtggctcaggcctgtactcccagcactttgggaggctgaggcgggtggatcacgaggtcaggagatcgagacaatcctggctaacacagtgaaaccccgtctctactaaaaatacaaaaaattagctgggcgtggcagtacgcgtctgtagtcccagctactcgagaggctgaggcaggagaatcgcttgaatctggaaggcagaggttgcagtgagccaagatcatcccagtgtactccagcctgggcgacagagcgagactctgtctcaaaaaaaaaaaaaaaaaaaaaaaaatacatacacctcggttgggcgcggtggttcaagcctgtaatctcagcattttgggaggatgaggtggacgaatcacttgaggtcaggaatttgagaccagcccggccaacatggtgaaaccccgtctctactaaaaatacaaaaattagccaggcatggtggtgagtgcctgtaatctcagctattcaggaggccgaggcaggggaatcacttgaacctgggaggcagaggttgcagtgagctgagattgtgccactgcactccagcctaggcaacaagagtgaaactccatctcaaaataaataaataaatagaaattaaaataaaagcccgggcgcgatggctcatgcctgtaatcccagcactttgggaggccgaggtgggtggaacatgaggtcaggagatcgagaccatcctggccaacatagagaaatcttgtctctactaaaatacaaaaaaaaaaaatatatattagccaggcatggtgacacacggctgtagtccaagctactcagaaggctgaggcaggggaatcatttgaacccaggaggcagaggttgcagtgagccaagatcgcgccactgcaccccagcctcgtgacgagcgagactgcgtctcaaaaataaataaataaataggtcgggcacggtggctcacacctgtaataatctcagcactttgggaggccgaggcagatggatcacttgaggtcaggagttcgaggccagcctggccaacatgatgaaaccccgtctctactaaaaatacaaaaattagccgggggtggtagcacacgcctgtagtcccagctactcgggaggctgagacaggagaaccgcttgaacccagaaggcagaggttgcagtaagccaagatcacacaactgcactccagcctgggtggcagagtgagacttggtctcaggaaaaagatcataagtaataaaaatacaaatacaaaaattagccgggcatggtggcagctgcctgtaatcctagctactcaggaggctgaggcaggagaatcacgtcaaccggggaggtaaaggctgcagtgagccgagatcacaccactgcactccagcctgggcaacagagtgagaccctgtctgaaaaaaaaaaattatacacacccagaacctcagaatatgagcttttttggaaatagggtctttgcagatgtaattgattcaggacctcgagatgaaattcatctgcaggcttcatggtcctttgctgtgttatcttgctttgaacaacccgtacacgggaactaattcaattttttgttttgagatggggtctcactctgccacccaggctggagtgcagagacacaatcattgctcactacagcctcgacctcctgggctgaagcaatcctcccatctcagcctcccaagtagctggactatagatgtgcgccaccacacctggctaatttttttattttttttgtgatgggggtctgactatgttgcccaggttggtctttaactcctggcctcaagtgatcctcccacttcagcctcccaaagcactgggattacaggtaggagccccccccgccacaacccaggctgcgctcattcttttttcttttttttgagatggagttttgctctgttgcccacactggagtgcaatggcgcaatctcggctcaccacaacctccgccttccgggttcaagcaattctcctgcctcagcctcccgagtagttgggatcacaggcacccgctaccacgcccagctaatttttgtatttttagtagatttggggtttcaccatgttggccaggctggtctggaactcctgacctcaggtgatccacccacctcagcttcccaaagtgctgggattacaggcgtgagccaccgcacctggcctcattcttaaccaggcctcgacaatcctcttcccttcccttcttcaggaccgaatttcgagtcatcattccaatctcagtgtatgtgttgcctcctccaggaagcccaccctgatgtctcccctggcccccactggagggcgtcttgtccctactgtttcctcgaacccagcacatgacctagcacacagctggtgctcaataaatgtctgcggcttgcatgacaaggggctgctctccccgatctgtaaatagccctggcctaatgataaacataatgagctcacacacggggactcataattgtgacaggcaggtgggccctggtggccacgtgacccctcagctccagcccgcgccgggctcagcccagcgcctgcgcccacggcagagccacagcctcctcattaaagcaggccttttacttaggcaggcgctgccaattctaattgattgtctgcgtccctgggggcactcgagttcccgaggtcagcagctgggccgggtccaggccgaggcaggcgggagggaagccggctcccggagagggaacaaggcgtggagattggacccgccgcctctacctacgcgctccctcctgtggcccccgggactggggcacgcgctgccctgcaggctcaggttccggaggctgatgtggcccccaccccagacccgtgcaagctcctggtatgtgtgatgttcctgcacctggtcatgccaagaacacgtgttgacaaacccacaggtccagagccagaggtggtagcacacaggggctggactcggggtggtgggggggcgggggtggggggaggagaggggagtgggggggctcaaatctaacagctctatgcctcaattttcccgtctataaaatgggatcctaatactactacctttttgttgttgttgtttttgagaccgagtctcgctgtctcccaggctggagtgcagtggcgcgatctcagcttactgcaacctccacctcccgggttcaagtgattctcctgcctcagcctcccaagtagctgggattacaggcaccgaccaccagacctggctaatttctgaatttttagtagagacggggtttcgccatgttggccaggctggtctcgaactcctgacctcaggtgatccacccacctcagcttcccaaatagctgggattataggtgtgagccaccatgcccagcctctaataccacctttctcacggggcttcttggggtaattaaataaatgcatgcctaggaaatgctgaagcccggctctagcctgtacttagtgttctgtggaggttatcacttatgcatttccacaagtattgagcacctactgtatgccaggctgtgcagtttcagtagtgaatagaacacgcagattgctgtccttgtagagctgacattcaaatggtgagagagagtaaacctaattttaaaaaagtgaacattggggctgggcacagtggctcacgcctgtaattccagcactttgggaggctgagaggggaggattgcttgtggccaggagttcatgacaagcccgggcaatagcaagaccccatctaactttttaaaattattattttattttattttattttttaagacagactgttgcgggctgggcgcagtggctcacgcctgtaatcccagcactttgggaggccgaggtgggtggatcacgaggtcaggagatcgagactggcctcaccaaaatggtgaaaccccgcctctactgaaaatacaaaaattagccgggcgtggtggcgggcgtctatagtcccagctacccaggaggctgagccaggagaatcacttgaagccaggagaatcgcttgaacccaggaggcggaggttgcagtgagccgagatcgtgccattgcactccagcctgggccacaagagcgaaattccatctttaaaaaaaaaaaaaagagtgtcgctttgctgcccaggctggagtgattgcagtggcaggatctcagctcattgcaacctcagcctcctgggttcaagtgattctcctgcctcagcctcctgagtagctgggattacaggttttaccatgttgtccagactggtctcgaactcctgacctcaagtgatctgcccacctcagcttcccaaagtgctgggattacaggcacgagccaccacgcctgaccacaagaccccacctctaaaaaaaaaaattaaaaattagctaggcatggtggcacatgcctgtggtcctagctacccaggaggctgaggcaggaggattgcttgagcccaagagttcaatgctgcagtgagctgtgattgtgccactgtaatccaacctgggtgacagagagaccctgtctccaaggaaaaaaacgagtgaatgttaaagtgttttggggaggacacaggtaacacacacacacacacacacagtctgaacgtggtgaaaacatatgcacacaacttagaaagataggttctcttatgtccattacacagatggggtaaatgaggctctgagacgaaaagaaaatgggctaattcaggaacctgtaaccatttctgtaacagtccatgctccacgtggccccagagcctttgcacctgctgtgcacgccataaatgtccattagctgaaaggattcagcccggctcctgggtgctgccccctgtcacacataatctataaactggcaggtgggataggccagacaggggtctcccacctcccagccttcatcaggcctgtccctgcctcagtaacccgatttcttgaagctgtttccagcttctcattctccctggagaagcttcattactcctctagggctgagatgcaagaacctgcagcctccaggactttcaaaccaacacattaaaataaaaaccaacaacttctaaatggagacccttgggactagaccttgggctgtgaggccctggctgcctgctgtcactttttttgtttggttttgttttgtttttcgtttttttgagacggagtcttgccctgtcgcccaggctgcagtgcagtggcgcgatcttggctcattgcaagctctgcctcccgggttcacgccgttctcctgcctcagcctcccgagtagctgggactacaggcgcccaccaccacgcccggctaattttttgtatttttagtagagacggggtttcaccgtgttagccaggatgggctcgatctcctgacctcatgatccacccacctcggcctcccaaaatgctgggattacaggcctgctgtcacttttaaccttgtgggaaagggcacgacagactctggggccattggagaattgtctgaagcatcaggaacttgtaataacccgcattagggtaatgattttttgtttgtttgttttgagacagagtctcactctgttgcccaagctggagtgcagtggcgtgatctcagctcactgcaaccttcacctcccgagttcaagcaattctcctgcctcagcctcctgagtagctgggattacaggcatatgccaccacgcccagctaatttttgtatttttagtagagacggggtttcgccatgttggccaggctggtctcgaactcttgacgtagagtgatccacccgcctcggcctcccaaagtgctgggattacagacgtgagccaccgcacccggcctggttctttttatagtaaaattccgagacccatcaacacttgctgtctccacttccccatttcctgttccctcctaaacctgctccaatggggctctcacaccccccacgccctcctgaagttgtcagccccacaggagagggattttgtctgctctgttccctgccggacagacgcccagtgcctagaagagcacctggcatgcagcaggtgctcaatacgtgtttgctgaaggagtgaatggctggatgctctcttagatgctgccctggaattgattccagaatccttctctacctacttggaactgactccagtagtgtctatcccacccaccaccctctcaccccatctgctgtgtgaaccaagcttagagctccctacagaggaagggtgaaaaacaatccatccatccatccaccagtaatccatatatccattcactcacccattaatacatccaccagtaatccatatacccacccactaactcatccatccatccacccaccaataatccatatatccatccacacacccacccatccatccatccacccacccatcaatctacccatccatccatccatccatccatctactcatccatctatccaaccatccatctataatccatatatccatccactcacccatccacccatccatctactcatctatctatccaaccatccatctataatccatatatccatccactcacccatccatccatcctcccatcaatccatccatccatccacccacccatcaatcctcccatccatccatccatccacccgcccatccactcatccatctatccagatccatccatccataatccatatatccatccactcacccatccatccatccactcacccatccatccatctactcatccatctatccaaccatccatctataatccatatatccatccactcatccatctactcatctatctatccaaccatccatctataatccatatatccatccactcacccatccatccatccacccatcaatccatccatccatctacccacccatcaatctacccatccatccatctactcatctgtctatccaactatccatccataatccatatatccatccactcacccatccatccaccctcccatcaatccatccatccacccacccatcaatactcccatccatccatccatccatccatccatccacccacccatccactcatccatctatccaaatccatccatccataatccatatatccatgcactcacccatccatccatccacccacacatccatctatccacccatccattcatccatttactcatccatccatccatccataatccatatatttatccactaacccacccattaatccacccataatccatataaccatccgccctcccatccattcactcatccatctatccacctacccattcatccatccatccataatccattcatccatccactcatccatacatccattcatccatctataattcatacctgcacccatttatcaatccacccacctacaatccatacattcacctgttcatccatccatccataatccatacatccatcctctcgcaaatacatacatccacttacccacctacctacccacctacctctctattcatccatccatccatctatccatccgtaatccacacctgcacccatttatcagtccgctcacccataatgcatacattcatctgttcatccatccatccatccatcgtccatacaactatcatttcacaaatccatacatccatttactgaccaacctgcccacccacctctctattcatccatccatccatccatccatccacccgctcatccattcatccataatccatccataatccatccattcatttattcactcatccatacatccatctatctaatcacccatccattcaccacctttttttttttttttttttgagatggagtctcactctgtcacccaggctgccaggctggagtgcagtggcacggtctcggctcactgaaagctctgcctcctgggttcaagtgattctcctgcctcagcctcccaggtagctgggattacaggtgcccaccaccatgcctggctaatttttgtatttttagtagagacgaggtttcaccttgttggtcaggctggtcttgaactcctgacctcaggtgatctgcccacctcagcctcccaaagtgctgggattacaggcgtgagccaccacgcccagctcctattcaccacctttctacccatccatccaccgatccaaccaccctcactccctccctacctcatgcactcattcactcagaggcaggctaacccttatgctcatctttattcctccccctgcctgctttgtgcccttgagccaggccctccctgtctctggcccttgctttcctcctctgcacagtgaggctgatgagagcacagacctccaagttttgcacagtggcctcaggccacacacagttgttatttgttgtgacagacagcaaagggtggtggttaagagtgcagcctgggctgggtgcggtggctcacacctgtaatcccaacactttgggaggccaaggtgggaggattgcttgagcccaggagttcaagaccagcctgggcaacatggagaaaccctgtctctacaaaaaaacgcaaaagttagccaggtgtggtggtgcaaacctgtagtcccagctgctcaggaggctgaggtgggaagatcacctgagcccgggacacagaggttgcagtaagccgagatcgagccactgcactacagcctgggcaacagagtaagaccctgtctcagaaaaaataaaaaataaaaaaataaagaatgcagcctggagtttgaatccctgctctgtgacttccctgctgtgtgaccttggccaagtgacagaacctctctgagcctgtttcccatctataaaatgaggctgataatagcacctgcctccttggggactgttgggggggattgcatgcaattacacatgttgcatatcgggttcaataagtgctggatggggctgttaatgtatgtttatggtaaccccaggaggtagggcacggctgtgagtgcctgacaggctgatgcccagtgaactctgagaagggagcagctggcaggaaccttggtgactgctgtggcaggcggagggggcagctatgccccttctcccctctgcttgtagtgggagagctagggggctgctggcccagcagcctcaagtgaggacccaacaggtgcacctgtttatgtgcagaaaacagggtctgcaccccctctgcacccagggagtcacagtccagggtgggagctatggaggctttgctctgtgcactctctggcaattaccctgacaggggcagactcagagtcctcaccatcaggggccctgggtcgtctacacagttcaggcaggggagacagaaggtgtggcagtggaatccactatatcactcaacaggcacggggactggttcccagatagagttaccccagggaaccatctcacaccctcaatccctaactccaagcctgagggcctggaagggcctgggacgatgacctccccacacacaagcctctctgaacctcatagaaagcacaaactcaagccaggtgcggaggctcatgcctggaatcccagcattttcagaggccgaagcgggaggatcacctaagcctgagttcgagaccagcctgggcaacattgcgagaccctgtctctacaaaaaaataaaacagccaggcgtggcggcgcacatctgtagtcccacctactcgggaggctgaggcaggaggataacttgagcctgagagttggaggctgcagtgagctgagaccactctattgcactccagcctgagtgacagagggagaccctatcaccaaaaaagaaaaaaggcacaaactcagaaggaaaaaatatagtaacaataacatttataaagggttttctacaagccagtatgtactagaattaatttttttttttttttttttttttggacagagtttcgctcaccgtaacctctgcctttcaggttcgagcaattctcttgccttagcctcctgagtagctgggattacaggtggccgccaccacacccagctaatttttgtatttttaatagagacagggtttcaccatgttggccaggctggtcttgaactcctaacctcaagtgacctgcctactttggcctcacaaattgctgggattacaggcgtgagccaccgcgcccggcctagaattaactttcactgtcacagccacgttatgaagtagatgctattatagaccccattttgttgacggggaaactgaggcacagagcggcaacatggcctgaccagttgcacagctggtaactggcacccaagtttgaaccctagactgtttaagcatcttattccccacacagtaaaaacagcccaggaaatgggtaccaccatctgcccacggtacagatgagtaaactgaggctcagagaagctgttaggtcatgtggagagaaaacaggagagttggggctcgggtcctgggccatagccccaaaagtgtggtctcctcactgcttcaatcaccaaatgctctctgggcctcggttttctcatctgtaaagtgggtttaattgcaaaatccaactgggaaggctgtgatgatgaacatatcagagcaggcatggaagaccccactgtgggatggggcagagcaggagggcctgcagaggaaggaaggatgtcgagtgagttggaggtcgccgtggggacagcagggggacaacgtttcccatggccacgctctcgaacctttctcccacctggagcagttggagctgcctctggcaccccctgcctgaaaactcatatccacagccgtcacccccagcatctccccagtcaccttgtgccccctgtcccctcccagagaacagcgcagcctctgtgtctaggcgtgaggtttgccagcgttgcccagagacgactgggtagcaggcgactcccgccccctgcatgcagaccccggcccgcccagcctccaggaccccctcaccaggacaatggacaggccaggggaggagggggacaggcagggctcggggccttggggagcctgggaacgaggcggctctgagttggcgtgcagagagggggctccgagagggcagggggcagggccggggggacttagagaagggggggctccgggacgggagggggacatggggacttagagaaggggctcagaagggagggggtgcacaaagggagaaggttctcggggaggggaggcagctgagcctcctcccccacagtggctccagaagcgagaccaccccctccccgtggcacgggctcgcgccgcaacaggtgttgggggttctgaaggcagcactaagagatgcaaaatccctttcggaagtaaagtgacacaggcctgcaccgctctaaatacagacacagctgactggcggtggggaggtcagagggagccaggagggcccgaggagagggagggaggtagagcatgggataggggcgaccccgagccccggggacgcacgcggtcaggtttctggatggtcagaaacccggtgacttgatacactcctgaccctgtgtcctggggccccaggggaggacagaacttaggcggccccctctgccccactcagcctccttgagccctgttcccgcccctcgaagagccccccctcccctctccacgcccctccccaacctcagcttcctctcctctcaaccccgccccactcagccctgccccacaacgccccccgcctccgagccccgcccctctcctctcagccccacccattttctctcagccctgccccttcccgcctcgccccttcttctcagccccgcccctctcctctcagctttaccactttcagcccctcccctctctcaaccccgtcctctctcggccccctctcttctctcagcccctctcgtctctcagcccccctctcctccctcacccctcccctctgaacgtctccccctctcggccccttctcctccctcacccctcccctctaagcccctcccctctctcagccccctctccttcctcagccccctcctctctcagccccgcccctctctcagctcctccccttgcggggcgcaccccgactgtcagcttcttctggggctgtccattctgggccaggaagaatagaaacgtgaccctttggtccagggtggcctccctggcccttcctcatctgagcaacaaagctctccaggttcgaccattcaggggcgccccgcacagttccagccccttcggcagggactctccctacagagaccccctgcccggcacaccagtcccgggctgggctcccctgagcagagaccctgccagaaggaccgtcctccatgaagaccccttcagatcccagcgtggacctcagcacctgattcctcatccttgagctggggttcccccagcatggaagtgcgcgatgggcagaaattctgacttcatcccttcatcctttcattcgtatatagagcgtctagtacctacagtcgtgagctctgcaaacctgtgctaggggccagggatacagggatacgtgaccccgacagagccggcctcgcccccagtgcggttcgcagttcagtgggggaggtggtcattgcggtgatgggggtcagagggcctagctggggggcgcacgggagtttatgatggctccctgaaggctttcctcaggacgtgtgatctaacctgagggctaaagaaatccattagctgccgggcacggtggctcacgccggtaatcccagcactttaggaagccgaggccggcggatcacaaggtcaggagttcgagaccagcctggccaacatggtgaaccctcgtctctactaaaaatacaaaaattacccgggcttggtggcgggcgcctgtaatcccagctactcgggaggctgaggcaggagaatcgcttgaacccgggaggtggaggttgcagtgagccaagatcgcaccaccgcactccagcctgagacagagtgagactccgtctcaaaaaaaaaaaaaacaaaaaaacaaacaacaaaaaaaaaccccattggcggggcaggctcacgcctgtgctccgggcagaggaaagagccagtgcaaaggccctgagtcaggaccaagagccctggctggcaatcccagcttagccattttcttgctgtttgtccaggacaagtggccagtgctttctgagcctgatctccacatctgtaaaggggactcctgacatattactcaactaaagggttcaggagggcacctggcatatagtaggtgttgaataatatttgtcaaaagtggatgaaggaattgagaggcgttagagaatgcgaaagaggaggcgcttggctcccatctggaggtgggtgggttggagcagctcctgacctcttctcctggccaaggccccctcccccccccaggcccctcctccctggcccgtcagtcccctgccagctgtctctccaagtgtgcgccagcccgacaggagcaggcgcctgttccggaacgcctgatgccttgcttcccagggattttagagggacaggtccgcggaagttcagctgccacacaggcttaaccctggagcctgggcgccgggtcctcagaggcccgatgccatccctcttgaccccatagagagcccgggcactgctcccagccttcactggaaagaccttgcttcaactccgagctctggccttgcccggctgtgtggccttgggaaatttagccaacatctctggtcatctccaccaataataatacttacaagatgatgtggtggctcaggcctgtaattctttgtaaattttttttacaaattacaaagaattcgtgaattctttgtaattctgtaaaactttgggaggcaaggcaggaggatcacatgaggccaggagttccagatcagcctgggaaacatgacgaaaccctgtctctacaaaaataaaataaaataaaaattttagccagacatgatgacacgtgcttgtagtcccagctactcaagaggctgacactggaggttggtttaagcccaggagtttgaggctgcagaaagccatgattgtgccactgcactccagcctgggcgacaggagaccctgtttcaaaaaaaaaattagaccaggtgtggtggctcatgccggtaatcccagcactttgggaggctgaggagggtggatcacctgaggtcaggagttcgagacgagcctggccaacatggcaaaaccctgtctctactaaaaatacaaaaaatagccaggcatggttgtgcatgactgtaatcccagctattcgagaggctgaggcaggagaatcgcttgaacctgggagacagaggttgcggtgagctgagatcacgccactgcactccagcctgggtgacaagagcaaaactccatctcaaaaagaaaaaataaaaaaagtcttttcatgaataaactctattattgtaacagctctctgtgttcccaagtattactgaccccatttcacggatgtgaaaactaaggtatgaagacggaggttacccaatttacagcacaaaataatccagtcaataataatcacaatctctgggcgcggtggctcatgcctgtaatcccaacactttgggaggctgaggcaggtggattacttaaggtcaagagttcgagacccgcctggccaacatgtcaaaacccgtctctactaaaaatacaaaaattagctggatgtggtggtgtgcacctgtagtttcagctacttgggaggctgaggcatgagaatcacttcaacccgggaagcagagtttgcagtgagccgagattgcaccactgcactccagcctggcaacagagtgagactccatttcaaaaaaaaaaaactagccaagcgtggtggccggcacctgtaatcccagctacttgggaggttgagtcaggagaatcgcttgaacccgggaaatggaggctgcagtgagccgaaattgcgccgctgtgctccagcttatctcaaaaataaattaaattgtcaattaaaatgaaataaaattaaaaattcaattcctcacttgctgaagtcactgttttttgtttgtgtgtttgagacacggtctcgctctgtcacccagcctggagtgcagtggtgggatcatagctcactgcagcctcgacctcctgggctcaagcaatcctcccaccttagcctccaagtagctaggactacagacccacaccaccacgcccagctaatttttattttttttttggtagagacagcttctcgctatgttgcccaggctggtttcaaactcctgggctcaagccatcccccaacccacctcggcctctgaaagtgcaggaattacagccgtgagccactgcactcagcctcaagtcaccatgtaagcgctgaatagccacatggctgctgactactgtgttagcacagatttcaaacgcctctttcactgcaggaagttctgttggaaccttgctgtgggagcatgtgcttgtctatgacttggccatgtgatgagagctcaggccctgcgaagttacagttaacttgatcatttctgtctgtctggtagaaaagagaaccccaactagggctttactgaaatatagaccattaattcgtttgtatctagcctgatcttaatctaacattccaccttaaaaaaaaaaacaatctcggtctgggcgcggtggctcatgcctgtaatcccggcactttgggagactgaggtgggcagattacctgaggtcaggagttcgagatcagcctggctaacatggtgaaaccccatctctactaaatatacaaaattagttgggcgtggtggcgcacgcctgtaatcccagcactttaggaggctgaggtgggcagatcacctgaggtcaggagttccagaccagcctggccaacacggtgaaaccccatctctaataaaaatacaaaaaattagccaggcatggtggtgggtgcctgtaatcccagctacttgggaggctgaggcaggagaattgcttgaaccagggaggcggaggttgcagtgagctgagaccgcgccattgcactccagcctggcaacaagagtaaaactccatctcaaaaaaaaaaaaaaatctccgtagatacctagttcctcaaatactcttagaaccagcctcaacattttattggttccctgagtaatgagctaatgaatcatggacatgtgcttacttgacgtttgggtgactcaagttttcagcatttcttttctttctttctttatttttagagacggggccttgctctgttgcccaggctagaatgcagtggtgcaatcatagctcactgcaacctccaattcctgggctcaagcaagcctcctgcctcagcctcccgagtagctgggactaaaagcaagcaccaccatgccctgttaatttttttcaaaattttttttgtagagataggggtcttgctatgttgcccagtctcaactttttgagaactatatatgtcttttttttttttttaagtttctcttctctttaactgaacagaacctggaagagacatgtaaatccccattttgcaaacagggaaactgaggccagctccttgcctccccccatcccagaccccctccaagctcaggggtccagttgttgcatacctagctctcctcatttgaggacccaccctcccaccgcccgcccaacttctagaaacaactctgagaacctgtctttctcctgatgcagccaagaaccaggtcagcccaacgctgggacatcaaagggaatctataaatacagctgcaggaggaaaaatagacactttcctggcccctcccagtcttccttctctcccactccagatctttcctggctgggttcccaccccaggagctgggctgaagccctcaaccccagggaccccctacaggaaggcagtggaggggaacagctgatggcaccccagttttccccaagaaactcaacctcctctgccctctcctcccctaccaggcagctgagaaaagagggatatggctgggtctttcctctgcagacgtggttctgaccagaggtgcgcattaccagcttgtcaaaatcttcagtccccagaaccagggaatcttctttccatctcctggggaacgtgtagggcttctgccctgtgctgggctctgggaagctggcaggaacaaggctgacttagttggggcagtcaaggagagcttcctggaggagatgatatgagctgagcccaaaggatgatgggaatgattggagagggtgaagaacaggtggcgagggggatggaagggaaagagtttggagtcctccttcattcttcgctcttcatatatatatatttcctccccatctggcccctactcctccttcaggtctcagctcaatgtcacctcctcagagaggccctccctgatgcccccagagaatcgctgcccttcattttctctttttaaattttcctttttttttttttttttgagacagggtctcgctctgtcatccaggctggagtgcagtggtgtcactacagctcactgcagcctcaacctccctggctcaagcaatcctcctgcctcagcttcctgagcagcgggtaccacaggcacatgccaccgtgcctggcaattttgttttattttttattttattttatttttgagacggagtctcactgctgcccaggctggagtgcagtggcatgaccttggctcactgcagcctccatatcccaggttcaaatgattctcctgcctcagtctcccaagtagctgggattacaggtgcatgccaccatgcctggctaattttttgtatttttaatagagtcggggttttgccatgttggccaggctggtctcgaactcctgacctcaggtgatccacccgccttggcctccctaagtgctgggataacaggcgtgagccaccaccgcacctggcctccttcatttcttttcttcctggtccttataataatctgaaatcattttagccaattacttgtttcctcattatctatctgcaaatgcctggagagggcagagaccctgcccacctagattatctccctctctctgtctagaactcacctccacggttttcccacctgtaaagcagggtggaagtgtgacaagtcgcttccatggagaagctgctggcctcatttgtcattaaagttactattttccttgcaaacggcttgcctggttctgtagactcttgtaatcgatatgctaattgatgcagattttatgtaaatgatacggatgtttatttctccctagaaattccccactggccttggggatccccgaagaagctggggagggggtagagctgtctcagcccaggttccttggggacccacccacacttaggcgggtgagggttgaggagcatctggaacttcccctaccccctcctccttcctggcctccaggctttgcccaaagatgagcagatctctagaccctggggtggggacggggatggggggatagaaaactggagacccaggggaaagactgagacagagacagtgagagagcaagattgagagatgaggaagcaggcggtgagatggacctagagacggagacgaaaggagagaggcctggaggggtgaggagagagggcaaggcaggttccccctgcagtcgcagagcaggctggggacggactacagagggacctgtcccccaccatgcttttggagtagaggagcgaccttcccatctccatcctggacgcagcctttggaatcttctggaagggaaaactgagtccagataagggagggccaccagcctcaccatcattgcagggcaggggcagggaggcttccctgacaatctcctgaaccttaccagacacttattgagtgcctactgtatgccaactctatgttgggcagtgctggacatcaccttggcctggacagttctgggcccggtccttgggctcccagtcgggtgtgtgggattcaaactgagacatttaccttgggaatgaaggaggacgggttgaccaggtcaacctggggggagagggaggcagaaggccaggaggagagaacagcccgtgcaaaggccctgaggcagggtagagcttggcgccctagaggagctgaattaattccaaaagcccccttacctgcctgccctcccttcctcccattcctcactctgttccagccacacgggcctcctcgttgttcctccaacatgccaggcacggtcctgccccaggacctttgcacagggctgtgcccgcccacctactacactctttccctaggtacctgcatgattttttatttatttattgagacagctctgttgcccaggctggcaataagattttagacatatgatctctgctcactgcaacctccgcctcccaggttcaagtgattctcctgcctcagcctcctgagtagctgggattacaggtgtgtgccatgacgcctggctaatttttgtatttttagtagagacagggttttaccatgttggccaggctggccttgaactcctgacctcaagtgatctgcccgcctcaggttcccaaagtgttgggattataggcatgagccactttgcccagccgctgcatgattttctaccccctcttcttcaagtctctgctcacatatcacctcctcagtgaagccttccctgactacctgtttaaaatctttctgctaggccaggcgtggtggctcatgcctgcaatcccagcactctggggaggctgaggtgggaggatcccttgagcctgggagttggaggctgcagtgagctatgatcaggccaccacgctccagcccagggccacagagtgagactgtatctctaaaaactaaaataaaatgagtgaatcctcgcctctgatctctgaactctgccaagatgagggtccatttgtgtcttgctcagccactgtgtccccagcactgcctagtagagcctggtacacagtaggtgctcaataaagttagctgaaaaataggccagcaaggggcaagacccccgaggctcagttctgcttcctgaaggtgtcggaggttttgtagtggacgctgagcaggccccctggtggggagggaagggtgtgatctgagctcgacacccttgatggcctctctgcacactgtcagtgtcacctgtgtggctggccttagtggcaatgacgaactgccactagctgaggtcattcacacacacaccctccaccgtcactgcctgtttctgctgttgctattatttttatttatgtatttatttatttttgaggcagagtctcattctgctgcccaggccggaatgcaatggcgtgatcttgactcactgcaatctctgcctcctggattgaagtgattctcctacttctgcctcccaagtagctgggattacaggcacctgccaccatgtctggctaattttttgttgttttgtttttttgagacggagtctctcggctcactgcaacctccacctcccgggttcaagtgattctcctgcctcagcctcccgagtacctgggattacaggctcccaccaccacacccggctaatttttgtatttttagtatagacggggtttcgccatgtaggccaggctggtctcgaactcctgacctcaggtgatccgcctgcctcggcctcccaaagtgctgggattacaggcgtgagccaccacgcccaaccatattgtattttttaatacatttgttttctgtgcttggatcttgccaccctttctgcataccagttctggttttctttctatctttaaagaaaaaatgtgggccaggcgcggtggctcactcctgtaatcccagcactttgggaggctgaggggggcggatcacgaggtcaagagatcgagactatcctggctaacacggtgaaaccctgtctccactaaaaatacaaaaaattagccaggcgcagtggcgggcgcctgtagtcccagctactcaggagactgaggcaggagaatggcgtgaacccgggaggcggagtttgcagtgagccgagatcgtgccactgcactccagcctgggggacagagcgagactccgtctcaaaaaagaagaaagaaaaaatgtggtaaaacacacatcacagaaaaatcagcattttaacaatttctaagtgcacagttcagcggcattaagcacattcacgtggttgtgcaaccatcaccgccatcctctccggaactttctccttttcccaatctgaaactgtccccaagaaacactcactccccacccactccccagtccctggcactccccatctactttctgtctctatgaatctgatgactccagggaccttctaggagtggaaccacactggatttggccttctgcgtctggcttacttcactgagtctgacgtcctcaagatgcatccacatctgaagcctgtgatggctgagtcatatttcaccgtgtccatggacccccttatgttgatccatgtatctgctcattggcagtcggtttgcttctgcccttttgctgctgtgaacacgggtgccaggatctgttctggtcatctgtttttatttctcttttgacaatgccctacgcaaatgtaacggcatcaaagctccttcccacagcttccaagagaggaggaagattaggaaaaatcaccaagaggaagaaacaagaatctcaggacctcccatggagaagactacttatctttattaagcaccaactatgtgacaggctccagcattttttttttttaatggggggacagagtctcgctctatcgcccaggctggagtacagcggcatgatctcggctcagtgcaacatctgcctcccaggttcaagccattctcgtgcctcagcctcccaagtagatgggattacaggcacgcaccaccacgtccagctaatttttatatattttttagtagagacagggtttcaccatgttggccaggctggtctcaaactcctgacctcaggcgatccacccacctcagcctcccaaagtgctgggattacaggcatgagccatggcgtccgtcctaggccccggcatcttttggaatgttctcatgttaaacaacttgttcacagctggtgagtggtaaagctaggggatggacgccagtgtgtgagctgcagagatcacatccactccactgtctgcttgcttgcctctcttgacaggcagctcactatcccatcactgattttagagaaaagaaaacagtgggtggaaaagagccatcctctccaacttgggatgatcagggaaggcctctcagagaagggaacgttggtggggaacagcttccaggcagtgggaacagcaagtgccaaggccccgaggcaggagtgagctgggtgtgctcactaggctggaatgggaagcctaggggaagggagatctaggggaagggagatttattttttatttttttattttttgagatagagtcttgctttgtttcccaggctggagtgcagtggcacgatcatctcggctcactgaaacctccgtctcccgggttcaagggattctcttgcctcagcctcccgagtagttggaattacaggcatgcaccaccacacccggctgattttttgtgtttttagtagagatgagcttttgctgttaccctggctggtctcgaattcctgagctcgggcaatccgccctccttggcctcccaaagtgctaggattacaggcatgagccaccgcaccaggccagaggggagattttgaaagcggagaatgtgacacctgcccctgcccaaatgacactcacctcccatgcctcagtttcctatctatacccaaggacagaccccagggaggttgaaggtccctggacaccctcgctccacccacaaattccttgttttggagaccaggatgccactgcctcatttgtcactacatcatatgcagatgatgccttgggggagggggttctgggccaacccaggacacacatgggcctttctgggggatttctcagtttctgagaaggaggaagccttgtaattgctctaatttcaatttataaatcaggcgcaggtcctgctgcttccgtctctaatttaatgtttcctgcgtgcaggcatggtgctgttagctccagccagacacacagcctgaacctcgggcccagggtctgcggggctgcagagggggcctcagacacagtggggaccactgcctccctggctgaaggtctcctgtgcacccggagcttgcatatataacccctctctcaatgagagggaagcagtgaggtgtagggaactcaggctgaccatgggaccaggcgtcctgggttctgggttggagtccttgtctccattcgaaatgcgcaaagcacctggagctgtgcagtgcacacagtaggtgcttaataagtgcttccgacattattatttccctggatacccctgctgcatactggggaggtggtcaccattatgtcctattttgctaaagagaaaaataagtgactctggtctcactctctgatcaatgggcctcagtttcccctttgatacaatgaaggcaagccctgttgaaatctcagactcccactcattcactccttcattcgttcattcattcaccacatgtgttgagtgcttactgtgtgcttggctctgttttaagcctcgtgacacagtggagtcctggacagacttgggaacttgactgtcttggggagggattggaagagaaacgagtaaatgcataagagaaagtcctattggtgaaaagttgaacaaaaccatcaaaacagggtaaagagggatgaagaggggaattatttttatttatgtatttagttaagagacagggtcttgttctcttatccaagctggagtgcagtggcgcaatcctagctcactgcagagtgattactgaaatgaggggaggctggggaaacactggaattgagatttggggtaggtgaggaaaggagccatttggacatctagggaaagagtgcacaaggcagaggggacaggcagtgtacaggccctggggcagtacaagctctgtgcaaaacctacatattcagagacactggctgtcccaataaagctgtacccttggcatttcagaatggagctgcctcctcctccaggaagccctcctggatcttcagtgacaatcatgattaggctgaaaaagcaaggcagggaggcagtctgtgtcaggctcaggggcaccaggcagggggcagggaagaggtctaagagaccccactcactcaccccaggtcacactcacttgccttaaggcccctccgattagggggatccctgagacactaatgctgtcctgagagttcttccaggacagtggcaccttcttcttaaaagctggggttcaaatccaggctccaccatttcctggctgtgggatcagtcaagtcacggctctctgggtctcagtttccacctttgaaaatggagtaatagcataatagtcctagaatcgtgggggtgcatatagcagaggcctaatatgttaagtcatcatcataattattaatatatgcgcaatacagggcatattttggacagcacgcccagggatgctgtgtggtttttggaaagggctccaccctctctgggcgccagactcccccaaatcctctcagcagctccaggagggaactggaggttgagaaagtgtcctcaacagaatcccggcccctttccgcgaagagtcaggggtcaaagaacagggagcgaggaagggtcaggaccatgcggccagcactcccccagccccggggctccaggcggttagctccgcggaggaccagctgggcggatttagccggcgcatctgccgcctgagcagctgccgttctggggggggccggagggggatttgggacgagggaaaaatctgtccgaggagaatcgcgtctgcgcggcccagctgccgacttgagctggggggacaccccgaatccgctcggacccgggacccctccccggccgcgaccgcccccacttgcctctaggggagggggcgttggggaggctctgacgtcacacgtggccccagccaatcggagctgcccgttcggagcccccaggggattccctggcctgagcggagacccggggtgcaacctagcagcgaggaccccccaacctggggttaaagagagcctgcacctggccggggaaactgaggcggggggccatttggggaagggatgggacccaggcgacctctctgagcggctgcccgtgagcctgactacagctcggcccagagagggccagggacccccgggagtcacacagcggggcgacgaggctagtggtcctgatgggggcgcgcaggcattggggcggggcttcccttcctggcaggcgccggcagtaaggggccgagctcagcctcaccccatcccggggaccctgaaggccttctgacctcctccgggtctccccgggcctcctcggacccggggccgcagcccgggccgcactgggaagaaggtgtcggtggccgcgggcgcccgcaaaacccgcactggaatccacccggtcggagcaggacgggagcgctgcgctgccaacgcgcccgcccaggccggggaaactgaggcccagcggggcggggctttgctcagaatcccacggctgggagggcgctgctggctctggtgacctcgggcgatgccctgcccctccctgggcctccctggcccatcctgccactgtcctccaggtcagggctcagacagccaggagccctgggcgggaggagggagaggcccggcctgaccttgccccggtccaggacatgaaagacccattcatggtcgcagaagcctgggtggcagctgagccaccggtgggggtggggcctccctcaaggcctttgtccccgaggtctctctgcctagaacgccctccccgcacacccctacccccacccccctgcttggatctatggtccctctaaggcctccatgccacctcctcgaggtcctcctggacctccagccagtctgtctcagcctgcagttctgtgcccactggtttctgtatccccaggctagacaaaaggcacagggcagatttgtcttgttgacagctcagtccagtatctggtacacagtaggtgctcaataaatgtttgctgaatgactagggtgcagaagtacccagctgggcacagccaagaaggcaggggagggaggggatgccaggggctgggcacagcgcagggaagggagtgtaggtgggaggacgcagattctagaccccaagccttggagctggggctcggccccctcccttgtggagcaggcctcagtggcccccagcgggcaggacacggggcggggtgggggctggacaccagcaggtgccttggctgatttgcctgggatgctggggcggccggaaggcgggaagggcaaaaccacgggcaggaaggcctggctgctcccggaggtttgtggtcaccaggatggccctgggaacatgcccaggaactggaagacctgggctgtctccatgggtgccagggagcctgcagattgccgtgggtggcctggggagcggggttcaagtcctgatacccagtccccactgagtggctgctggaagccagtgcacaacctgtctggaccccctggatggcacggagccagggatggggcatagtggccccagcactcagtaagtgtgcaagaaaagtcacaagctacataacaacaaagtgttggctggtctcagtggctcatgcctataatcccagcactttgggaggccaaggtgggaggatcgcttgaggccagtagttcaagaccagcctgggcaatgtagcaagccccggtctctacaaataataataacaatttttaaaaaaatcatctatcctctctctcccccatttctctattatctatctaaattatagaaaaacagaaaagaggccgggcgcggtgactcatgcctgtaatcccagcactttgggaggccgaggcgggcggatcacctgaggtcaggagttcgagaccagcctggccaacatgatgaaagcccatctctactaaaaatacaaaaattagccaggcatggtggcagttgcctgtaatcccagctacttaggaggctgaggcaggagaactgcttgaacccgggaggcggaggctgcactgagtcaagatcatgccactgcactgtagcctgggtgacagagcaagactccatctcaaagaaagaaagaaaaagataagaaaaacagaaaagacaagaaaaaataagtgtttacagagcatctactgtatggagagaggccagagcgaccaggacagcactcagtccagtgggggagacgtacaggatcacatccacatggggaggtactttggacagggaggggcactgaggcatggagagcagcccctgctgtcctgaattcattcgaagggtcaggagggttacaggaaggtctctgaaacctctaggctctgtcctggggtctcaaattcatgggggaacctgcagtcctcgaaaaactcctttctgggccacgtcccacagggcgctggcgacagaggggcaggtccgggagtcgtgaaccatggagatctctgcagccggtttgctcaggtcgaaaaccccctgacgctctctaactgggtgaccttggacaagacctccctgtgcctcagtttcctgaagtgtcgagtgaatgttgctaaatggaatacttgtggattgaagaaatgatctcgtctatgaagggggccacccagaccgtagggttcctgacagcctcattgaccccatgggctgggtgtgattggggctggatcctggggatgcgagtttgaacagaggggaccaggagaggaagttggggcggctcaattaataagtccaccacctggaccaaagcagggtgacccccttgggcctcccccacaactcacccaaacgccacccaccggctccgccctccgctccgcgccgcggttgctccgggccgggttttgcgcggctccagcccggctttggggaggtggggggttgctggaaagggggggcggaggtggcagaccgcgagtcgcagcggcggccgcggcgggcggaggagatgcggccgcggcgcgcccccggtccggccgccgcgcagcgccccccccggagccgacgccagcgcgcggggggccggggctgagccccctcccccagcgcagcgccgtgggcccgggggcggggagagcgcgcgcccccagcccccctccccagccggggatgccgggctgagcggcccggccgggacaggtgcgcgcacggacccccccagcccgcgccctcccgccctcgcgcctcccgcccgcgcactcgcggcggccgcggctccgaggtaagcgccccggggcgtctgcggagggggttgggggaggcgcggggatgggggcgtctgtcggcacgcagctggggggaccgaaaggctggctggggtggccaggtcaggcgctaggactggggggcctgcgggccctgccactgggaggggacggatttggagccagggagggggtttggggagcgctagaacgagggggggaatctctcagccacacaactggggaggggaccggattggagagggggtcgctggccgtatggagggatccggtgggggtccggtggcatcgctttggaggggctggattttggcctggggcgctccctgagcctccattatgggggtgtctaatggcaccgcaacgtggggggggcgcttggattgttgactgggggcctgtatgtgcagctaggttgggggttctgtcggcaccgcagcgggtggagattttgtcctgggggggcccggagaagacacaataatgaggctcgcggctgcgccgctggggagctggattggggcccaggtggggggttcggggcaggcagggggcctgttggtcgggggttgggggtggcgttggggggcggggtcctgagagccaagtcgaggcgacccggggctggtgtgggggtcctggcactgggaggcccctccgccccacttcgcgtccggccgccgcaccttgggcgcccgagtcctctccggcctcctgtccagcccagaacaggacgagtcgcgggtccaggccgcggggcaggggtcgcagtggtgttggaggggagggccggccggtccggatcccccccgctgcagtgggggcctgggggttcgggggcccccaagagctgacaaaaggacaaagaaaacgtctatctccaagcgcgccgggatgggtggggggcgccgagtgtggccccctcccgcgggcgctgattggtccccggggtgggggtcacgtgccctcctctcctgctctccgcctctgggcgctctccgagtttggggcatctcccagagggggcgctactgtcatgaacccccacctctgccccggccgggttaatgctggagctaggagcgtttgcaagagtcctggggttgggggagggattcgcagaccctcacccccgccgccatgtggccctctctctctcgctgaggtctttgacatcctctacctgaggctgtcatctttgacccctagactggagcggaacggggacttggagttactggggtgctctgaggctttggggttctgggtttgggtttaaggagggaggagggagagagggactcatggctatggtgactgaagggggcccctgccccatttgtaaaattgcatttctgtttttctgtgttccttcagcttgtgagaaggtccaaattccctctccaaaataaaaattcaggacccctggggcatcccccttgcccccaaaccctttcccacatcccgggagaccagtttctttcaggcgcgggacttcaggatgtacctgaacaattgctttaaactctacatagggagagcacaggttgtggggtgggtggtggggaacggctggggccaaggctgagttggaactcacctgggagggggtcttaaactctccgggaagttgtctgggagtcactgccacccacacagagacgcctcggatattgggtaggtggcagcctggcgtcagcctcttgtctgttctgaaccggcccatcccaacagcaggtggggaaactgaggcccgaggaagccgttgaaacccaagagctctcctgcatcccagctcctcctaagggttgccctgaagctctgctcctcccttcttccccttgactctgggctatgcaggagctttgagaggaggcgcttagctgtgtggcctcaggctggtccctagtcctttctgggcttcagtctccccaggagatgcgctttggttttggactggagttgggggaggtgaggcagagaggggtcgcttgagactgtcttgatctgtgcctgccccattttgcctctggttcccccaccagactcggctggggctgagcccccacaggatcttagggtctgtgtcaccttctctgctttgaagtgagttgtctccaagcctaggtatccagtccccccaggaggggcctttccccctgagacctcagtcctcgcctctgaccgatgggcatagaaggggctggagatgtggcatgtcctctgcagtggccacaccaggctggcagccggagtttgctggggttaccaggactgggcctggaagatagaaatcaaactgcccttggaaaggtgaccatgacgtcagcctgcaggacaggtgagctggatccctggggactgaaggatgttgctggtcaccgcccgtctcctgggaaggaaggtgtcccgagctgaccctgggcgtggccctgtcctgtgggcccggaaagggagatgctggagggagaaacttccagggcagtggtcaggacaggtgggagcagggaaagctgcctggaggagggagtactgggactgggcttgaaggagaaggattctgcctggaggagagggggacaggcattgcaggcagagggaacagcaaggatcatcacagtggggtatgttggaggagccctgagtggctagactatttaagaggaccatgaggtaggcagtagccttgaatgccaagccaaggagcaaactttatcccaagggcaatggggagccatggaaggttatagagcagggggaggggcatgagtcacatttcagatcttgaggaagggtagctacgaggagacaggctccttggaaaccaaatgcattgctggaaggagtggtgagccgcccctcgtgggaggcaggccagaggggttggacggctgtctttgcagaatcctggataaataatcctgatattggtcagccccaagtgatctcctggatttttttttttcaatttccaggtactgtgggttttctgaactgctgtcgtgtttgagatagcaggttctgagagtctcaggtatttaaggggttgtgggctctcatactgtgactcctccaaaacccagccgtgatttggttgggctgtggctttctcttggccatggtcgtgcatttcttccctccctgtcttcatgtagcagcagtagggaaactaaggctcaaagcagcccaggattcaggccccagccaccggccccatgtcctttggctgaattatcccaaaacagacccttcaccctagacaccctcaccatcatgcatggtggtgctggggtcgggtgtgtgaccataggaacccaggcacgcaatcctttttcgttatcacggtccttcatcacctctcctccagggacatccaggtgaagtggcagacattaggacaagtaagacagtggcggtggctcacgcctgtgatcccagcactttgggagaccgaggcgggaggatcacttaaggccaggagttcaagaccagcctggccaacatggcgaaaccccgtctctactaaaaatacaaaaattagctgggcgtggtggctcacgcctgtaatcccagctactcaggaggctgaggcaggagaatcgcttgaacccagcaggcagaggttgcaaggagctgagatcacgccactacactccagcctgggggacggagcaagaccccgtcaaaaaaaaaaaaaggaaaaagaaaaagtaagagacttgggaggctggggaccacccttaggactctttggcagggacatggggccctactacttgccaccctcaatgctccttctctatctggccccagggtccaaagctggccaccccagggccccactgggaggcaaggcccactctagactacatttcccaggatgcaccatggcccagctaagccagccttccaagggcggacctaggagggagcttcccaaatacaggaacccagaggaggattgtgggttcccaggtgggcctggttccaggcaattaggtccctcagtcagtcaacaaatgctgccagtggtccccatgtgctgtgtcctgtgctgggtgatgctaggatcccagagaggtaactttaactcctctgtctagttggaggggcttccaggccagaggaagagaaacaggggcaggcactggccacccgtgctacacaggttcagggctagggcagagggagcaactggggctagggaaagctgtaccctgcctcatggatcagggaagatgtaccaggaaggggcactgtagctagggccatgatggatgtttaggagttcactagggggcagccatatgttttctgatgattgcagaagaacctccctcccctgaaggccatggactcagagcccctggggaagctgaagtagccattctgaattatcgccctcataggcagccgtagcatttggatcagactgacttgagattgaatcagttttttctctcactcactcatgccccctctctgagcctcagtttccccatgggtaaaacaggggttgctgttctgcctcccttagggttgaccatttaaacaagaggttgcaggcaaaatgccacatatagttctgttgggtttctgactccaagaaaaggaacaaccttgcaaagcagaaacgtggagcttctggccatgatctcatttggagctgtgggagcattgcttgcatttaacaagtggactgatgtttagtgagcacctattaagtgccaggtgccgcggacccagcaatgaccaaggcatagactactgcatcctgcccttgtcgaattcccagctgggtggggggacaggggagcacagacactaactagagaaagggcaaggtaaatcaggtatagtcagtgccctgaagacagttatcttgcaagtggctgagaagggcggggctgtgttcactgaggctgtcggggagggtgtctctgaggagatgacatttgagctgagacctggaagatgagaaggagctggtcatgcagagatcttgggaagcagcacttcaggcagagggcacggcccgtgcaaaggccctggggcaggacctcacctggcgtgttggaggaacaccaagtaggcccgtatggctgcagcagagtgtggaggggagagtgggaggagggaagggcaaggagagtacggggccagtcatgcagggcctcgtgggctgcagtgaggatttgagcttcgacccccagggaggtgggagccatggagggctgcgggaagaggagggacaggacctgactcttggtgccctctggtggcagctttggggaagacagacgggggcgaggctggaattgaggaccaggtcctggtaataattgatgggggccggccaggcaagggtaatagaggggggcaaagtggatggataggggacagatttttggagtcacccacaaaacttgctgagatggatgtgaagaggctgaaagcccctttctctgggggcagggcagtgctgtggttaacagcgcagcgtctggactcctgggcccgggttcagatcccagcttggccatttctgggctgtgcgaccttggccccatcccttgcccaccctggccccgagttttcccacctatggaatggtcagaagagcccctgtgacctaccccgctgggctcagtgagggacagggctgggaacacggggtaggcaccctgtaagtgtttgctgttgtccctctttgaaggtcggagcctcaggctctggggagcagtgaggcacagatggggatgacagcctccctgagatgacccagcaaactgggggccccttcccctcgaacactgttctccacagtctgacggttctcaagccccatcccccagcacccacgtcactctgccagcccctccatcattcctgagccctgactcaccaggacttgtggtccgctctgaccccggggcctttcccctgggacctatttcccgcctttgtcttcttcaagttcattcgccaggtcttccgttcccagcagcacttggcactccctgagacctccacccccattccccaccacctctctcagcggggccccctccaggcctctcacactggtcccggccacctggggatccccagcctcttgggaggggcagagactggaggaattctgggggaggagttcagcagtgcggggaagggcacccagaaccccaacttggaggggaagggctcctcattttctgcccctagatcaagcccccaaaggccgggccatctttcttcctccctaagtggagtccctataacagaaccttattctcctctgaactccacaactgggtcccaagctcacgacccacccctctgtacttcctccaaattgggtctgaagggaggacctgtccgtccccaaacctgctttggaatctgtgggtgctcgacgccccagccccagcctggattcccttggagccccagccccctcgagccaccccctcctgggtcccttaattacctgctgggtataaatgacactttaatttcctctgaatggtcgttgcaaccccccccaccgccccacccattcctaattacaagttgctgtttccgacttgcctcctggtggcccaatttcaaaacagtgattaaaattaattacctgggggccccctccccggaggggaggagccccaggagccccagagatgcatccacgtccccactggaggttctgcctgggctcccacaccctggcttcccgagtggcctggggacagggacagcctctctctgggtctctgcttgcttatctgtgaaatatttcagctggccagatgcggtggctcacgcctgtaatctaacactttgagaggctgaggcgggtggatcactagagatcaggagttcgagaccagcctgaccaacatggtgaaaccctgtctctactaaaaatacaaaaattagccaggcaaggtggcacgtgcctgtaatcccagctacttgggagcctgtggcaggagaatcgcttgaacctgagaggaggaggttgcagtgaacctagactgtgccactgcactctagcctgggtgacagagcaagactctgtcgcaaaaaaaaaaaaaaaaatttagggtgtgccatcatcacgggcaggtagcacattgtgagcacttggaaaatgtcagcaagaggcggcctcacacagtggctcacgcctttaatcccaacactttgggaggctgactcaggagaattgtttgagcccaaaagttcaagaccagcctgggtatcataccccctacaaaaaatacaaaaaattagctgggtgtggtggtgcacacctgtagtcccagctactcagaaggttgaggcaggaggatcgggtgagcctgggaggtcgaggttgcagtgagctgagatcacgccactgcactccagcctgggtgacagagaccctgtctcaaaaaaaaaaaaatgtcagcaagaagcaagatcacgtttgcatccatggcacccttatgtgctatgtgacctcagcaaaatggcttaacctctctgagcttcagtttttccatctgcaaacagagatgagggtgctggtctctgagggttgatgccggcaagaaataagttcatatgtgggaaaagcatggcgcatagtaggtgcagtcttcctaaatctgatcttgaattccttctctcctggcctgctgtgagttgaatgtggaaggcggctcagggtagagtcccatcctttgcaaaagagacactcggcattaattgagtgcttcctgcatgcagggctctgtgccaagccctggacatgcacaaccctgagcatggctgagtctccagccatattggtgcacagtaggtgtttaagaagtctggaatgaacatatccttgcaactattttaattaatttatttatttatttgagacggagtcttactgtcacccaggctggagtgcaatggtgcaatctcagctcactgtatcctccgcctcccaggttcaagcgattctcctgcctcagcctcccaagcagctgggattacaggcgcccaccaccacgcccggctaatttttgtatttttagtagagacggggggtccaccatgttggccaggctggtctcgaactcctgacctcaggtgatctgcccgcctcggcctcccagtgtcgggattacaggcgtgagataccgcgcctggccagctattttatttttaaattattattattattatcattagtagtattatttaagtcagggctctcactctgtcgtccagctggagtgcagcgaggccgtcacagctcactgtagccttgacctcctgggccctagtgatcctcccacctcagcctcccaagtagcatgtcgcaccacactcagctaattattattattattattttttagagatggggtctggctgtgttgccccgtctggtcttgaactggcctcaagagatcctcctgcctcagtctcccaaagtactgggatcacagatgtgagccacctcgcccagcctccttggaactattttataagtgggggctcttgctgggacattcgttcagctgatttgttgagcacctactgtgtgccaggccccatgctgggcactggagtcacagcagtaactgagacagacccctgcccttgtggagccaatatttttatcctcatctttcacaggaggaaacaagctcagagatgggagggttctaacccaaggcaacacagcagtcacgacagttaactaagcacctatcatgggttgctcatttacccctcatgagaagccgatgtggatggttatcatgcttggttcgctgatggggaaactgaggctctgagaactgaggactcaggagggaaggtcaagagtggaggggaggccgggcgcggtggctcacgcctgtgatcccggcactttgggaggccgaggcgggcggatcacgaggtcaggagatcgagaccatcctggctgacacggcgaaaccccgtctctactaaaaatacaaaaaattagccagacgtgtgtggcaggcgcctgtagtcccagctactcgggaggctgaggcaggagaatggcgtgaacccgggaggcggagcttgcagtgagccgagatcgcgccactgcactccagcctgggtgacagagctagactctgtctcaaaaaaaaaaaaaaaaaaaaaagagtggaggggaggccgggcgcagtagcttaggacgggcgcagtggctcacacctgtaatcccagcaccttaggaggccgacttgggcggatcacctgaggtcaggagttcaagaccagcctggccatcatggtgaaaccccaactgtactaaaaatacaaaaattagccaggtgtggtggcatgcacctgtaattccagctactcagaaggctgaggcaggagaatcgcttgaacccggaaggtggaggttgcagtgcgcctagattatgccactgcactctagcctgggcaacaccagcgagactgcttcagaaaaaaaaaaaaaaaaaaaaagtggaggggaggctcataggccgcctcccaggctgggcagggatgagttaaccgacatccagtaggatgggggacacgggggcctctctcttctgccccacccctcatgcctgggccccagggactccctccagccttcctgccaagttcctagacagccccagagcctggctgggctgtgatgggggcgaccgaggcagctggaggggcagctgtaagcagagcccgtaaccagacctggacggccctggggcccggctgccgggaccaggttactcgatcccccgagggatgctggccccggagccagaatcctggggcggcccggacgatagggagctccttgtatggaactggaggcagacatcccgccctcgtcccttgtgctgtggcagatggagaaacggaggcttcaagcctgcctgggatcactgtcatcttggaacagagaggcccagagagggcgtgtagctggcctaaggtcacacagtaaggtcatttaacctaaagtgaatgcctgtgtgccaggccctgagctagtgtctttattttatggacaacagcaaaaaaaaagatgcgggcagggcacggtggctcatgcctgtactcccagcagtttgggaggccgaggtggcaggatcacttgaggccaagagttcaagaccagcctgggcaacatagcgaaaccccgtctctacaaaaagtacaaaaatgagctgggcatggtgatgcacacctatgatcccagcttactggggaggctgagacaggaggattgcttaaacctgggaggttgagactgcagtgagctatgacggcaccactgtactcagcctgggcaacagagcaagaccctgtccttagaaacaaacaagaaatgaggctgagtgtcgtgtctgagtgaaggggagagccccaggagtcctttctgtgctgtgccagcctccccatccaccttgaccttctgtctcttcctctagtggtctcagtctccacgctttttcctctgcagttccttccccttggagcaccttcctcaccttgtcacgaggtctccccttcgaccttcaggcctcagctcaaatgtcccctcctctaatcattcctcatgtttttatggtcgtgcttattattgtcagaagctatcgagttccgatattggttaacgtgtgtagtgtacccccgtctccccacgggactgggagccccataagggtagggctttgtagctgtctcggtcacagctgtgtccccatgcctgaacacatgtgtctggtatacagctggtgccaaataattattaatccaatgagtaagtaagtgacttccaatttggggtacagggcgccagagctggatgcagttgcttccaagttggcggttgagcgaagatgagggcagggtagttgtggctgggggaacccagggaaactgaggcccagccagggcagtcagagaaggcttcctggagtcggggacacgcatgcatggccttgactggtaagcaggagtcagctgtagggcttggaggacagagcgtgaggttactatgtctggctggttgggagggcagctggaccttgaggaggctaaaaaggttccccagcagaggggacagcctgagccaaggtctgcagggaggggctggaaatgcctgatagtaggtgagggcaagaagaagcttcaagttattcccagggtgggaggtgtccttgaacactgaggtataaaaaaaattggttctaggccgggcgcggtggctcaggcctgtaatcccagcactttgggaggccgaggcaggcggatcacgaggtcaggagatcgagaccatggtgaaaccccgtctctactaaaaatacaaaaaattagctgggcgcgatggcgggcgcctgtagtcccagctactcgggaggctgaggcaggagattggcgtgaacccagaaggcggagcttgcagtgagccaagatcgtgccactgcactccagcctgggcgacagagtgagactccatctcaaaacaaacaaacaaacaaaattggttcttcttctgtggggcactggggagccatggtaggcctttgagcaggggagtggcagggtcagagctgagcttgggatatgcagtaaagggatggcttgttggtggtgccggggtcagagaggagagtgggcattgcccttgaaggacagctcaatacccaggctaggaattacccctgggacagagccagggaccaagccagcttctggaagtaagaaggattcaaggtagattgaaagtaaaacttccctgctcaggcaaaaaagaaaaaaaaaaaaaaagggccaggcacggtggctcacgcctgtcatcccaacactttgggaggctgaggcaggcggatcacctgaggtcagaagttcaagaccagactggccaaacatggtgaaactttctctctattaaaaagacgaaaaaatttagccagtcatggtggcgggtgcctgtagtcccagctacttgggaggctgaggcaggagaatcgcttgaacccgggaggtggaggttgcagtgagtcaagatcgcaccactgcactccagcctggacaaaaagagtgagactccatctcaaaaaaaaaaaagaattttagctacagaccagctatcaggaaacaaaaaaatgtagaaaaaaacatatttcacctgccgcacattggttcagattacattctttcttcctcatggaggtgctttagggttgaattttaaatcacccacagtgtacagagatggggaaactgaagcctggagaagggaagtgactgtctgcggtcaaacagctgaggcagagccggggtttgaacctgggctgtgcagttctggagccaaagctcttcttctgggacttcttcagctgccgatgttttctgtccgggcctcagtttccccaaccagccagtgagattgggctgagcagggcggggcaggatggcttgtcgatggtgcccctggttcactggggtttttttttttttttttttgacagagtctcactctgttgcccaggcaatggcgcaatctctgctcactgcaacctccgcctcctgggttcaagtgattctcctgcctcagtctcccgagtagcctgggattacaggcatgcaccaccacgcctggctaatatttttatttttagtagagaaggggtttcatcatgttggccaggttggtcttgaactcccgaccccaggtgatccacccacctcagccttccaaagtgctgggattacaggcgtgagtcaccatgcccggccccaacaagcaattattttaattttattttatttgagacagggccttgccgtgtcactcagagtgcagtggggcaatcgcagctcactgcggcctccacctcctgggctcaagcgatcctcccacctcagcctcccaagtagctgggaccacaggcacacatcaccacgcccagctaatttttgcattttttgtagagatggggtatttctatgttgtccaggctggtctcaaacacctgagctcaagtgatcctcccaccttggcctcccaaagtgctgggattacaggcgtgagccaccgtgcccggccccaggtgattattttatttggggaatccacgcatgaagctgcacctctcagagtttgtgatgcacgtggatccctgcaggatcttgatcaggtgcaggcctgggtgagcgggcctggtcctgggattctgcatttctgacagtggtgcccacacagctgttcccagacccacactcccagcagcacacgggcctgcgtgtgatgggggaggagaggagggcataaagtggggagggcagaggcgtctgggttccaggaaggtccaaggggagcctctcttagatgacctgaagtgaggaagtgagttgcgtgtgtatctgggggaactcccaaagcagagggcacagcctggggtaaggccctagggcaggaccatgcctggcctgttggaggaacagcaaggaggcccttgtggctggagccaagtgatgagtgggagagagggaggaggagagggtagacagggcatggggcaggttgtacagggccttgtgggctgcagggaagaccccggctttgaccccgaggcaggtgggagccatggaggggtaagggcagaggagagacgggacctgactcatgtgctcagaggcgtcctctggtggctgtttcgggaaggacagcctggggatcagggcggaggggactgggctgggctgagctgggccaggcaggcggggatgtgagtggccacggcatggacgggaagcggtgagagttctgcgtaaactcgaaggcagaggccgcaggagtggctaatgctggctgtgaggctggtggaatggggtgtggcggggaagtcaggatgagctccagttgtgtcctaagccatcagctgagacggaggacgcagaagtggggccgggtcgggggacatcgaccatccgttgaccccgattggatcggtagcctcagtgccactccagcgagaaccccattagggtttttgttttatctgttgtttgtcttggaactcacaaccggatcctaaaacttacaccgaagcctcaggggccaagaacagcccagacgcgctggcctggaggagagaaggttgggggagagttcccccaggaaattcaggcccatgacggggtgacagtagctagggcggcgcggttctggggtcgtgccccgtatggctgagggtgagacttcatgagccccgtgcctggagcggctgaggggaagttgaaccccgaatccggagctgggggaggcctggctacagtcaggacggtgggtgtcatcggatatagacggggtttcgggacccaggagcgtacaaggccgcccaagaggggcgtgagtcgagggaaaagagagacggagagctggcggttgaggggggtgcaaggcgggacagaaagctgggagtgaggctggcgagtgtggggcatgggggtcgccagaggacagagctcccaggaagaagagctaaactagggggtccccgaggacgtttccattcctgagcttcagtttccacatctgcacagtgggctcatgtttgcagagctggagtgacagctgggggcctcctggagggagctgttgctttgtggcccctctcccccaacaaggcgcccccacagagtacatgcaagtccccagggttgcaggcaggagccccccaacccctggggcacgcagacatgtgggtgcacgggtgccccggagaaccccgcacgccacggggcgcacccgccagccccgtggctccctgtgaccaggtgtccggcagccgcagcgtggcaggtgttggggccgcttctgagcaggcaggcgccgagcggctgctggcagaggctcctcgagtttcacggagagaagcagatggtcttggggatagggggaggcgcacaggcgtcgggtaaccccagatcgagggggtaaactgaagctaagtagatggggttcgttgtgaagtggcctggactccccgcagtaaacatttggggttcagttgtgtgttattatcaaaataagtaaaatggagcaggatctgtgggctccgctgatccctgacttcgggcaaatgactttacctttctgtgcctcagtttctctgtctgtataaggggcctattaagagaactcaccaggccaggtgcggtggctcacgcctgtaatcccagcacttggggaggctgaggagggtgggtcacttgaggccaggagttcgaaaccagcctaggcaacatggtgaaaccccatctctactaaaaatacaaaaattagctgggtgtggtggtacatgcctgtaatcccagctactcgggaggctgaggcaggagaattgcttgaacccgggaagctgaggttgcagtgagccgagatcacgccattgcactccagcctgggcgaagagcaggactcttgtctccaaaaaaaaaaaaaaaaaaaaaaagagcactcaccccttgggggtgttgtgaagattaaatgagttaatttaagtacttatgacaatgcctggcacctagcaagtgctttgtgtttgctaggtgttttgttgttgttgtttttttgagacagagtctcgctgtgtcacccaggatggggtgcagtggcgcgatctcggctcactgcaagctctgcctctcgggttaatgccattctcctgcctcagcctcccgagtagctaggactataggcacctgccaccacgcccagctaatttttttgtgtgtttttagtagagacggggtttcaccgtgttagccaggatggtctctatctcctgacctcgtgatccgcctgccttggcctcccaaagtgctgggattacaggcgtgagccacggcgcctggcctgttgttattttatttttttgagacagggtctcacgtggttgcccagactggagtacagtggaccaatcataactcattgcattcctgaactcttgggctcaagccatcatcctgcttcagcctcacaagtaactgagactagaggcatgtgccaccacgcctggttaattttttatttcctgtaggaattgtgagggggtgtctcactatgttgcccaggctggtctcaaactcttgagctcaagcagtcctcttgctttggcctcccaaagtgttttacaaaattaatacaaaaattaaccgggcgtggcagtgcactcctgtaatcccagcttctcaggaggctgaaacacgagaatcgcttgaacctgggaggtggaggttgtagtgagccggtagtgagccactgcactccagcctgggccacagagtgagaatcttttcccccctccccggctccctcccccctgcccaaaaaaaaaaaaaaaaacccaggcatggtggtgcacacctatggtcccagctactcgagaggctgaggcaggaggattgcttgagtccggaagttcaaggctgcagtgagtggtgattgtgccactgtactccagcctgggcaacagagccagaccctgtctcttaaaacaatgtttaaagaaatagtttctagagttaaatattgttctgataaaactcaagatgaggccgggtgctgtggctcacacctgtaatccaagcactttgggaggctgaggtgggcggatcatgaggtcaggagatagagaccatcctggctaacatggtgaaaccccgtctctactaaaaaatccaaaaaattagctgggcgtggtggtggcgggagcctgtagtcccagctactggggaggctgaggcaggagaatggcgtgaacccgggaggcggagcttgcagtgagccgagatcgtgccactgcactctagcctgcgtgacagagcgagactccgtctcaaaaaaaaaaacaaaccacaagatgaaagacagaccatattacaccaattaggatggctactgtcaaaaaactggaagatagccgggtgtggtggctcacacctgtaatcttcgcactttgggaggccaaggtgggtggatcacctgaggtcaggagttcgagacccgcctgggcaatatggtgaatctctgtctgtactaaaattacaaaaattagccaggcatggtggcacccgcctgtggtcccaggtactcgggaggctgaggcgggaagatcgcttgaacccaggaggcggagattgcggtgaaccaagatcatgccactgcactccagcctgggtgacagagcgagactccatctcaaaaaaataataagaatgaaggaggctgggcatggtagctaacatctgtaatcccagcacttggggaggtcaaggtgggtggattgcatgaggtcaggagttcaagaccagcctgaccaacatggtgaaaccccatgtatactaaaaatacaaaaaaaaaaaattagccgggcgtggtggcgtgcacctggagtcccagctacctgggaggctgagaaaggagaatcgcttgaacccaggaggcagaggttgcagtgagctgagatcgtgccactgcactccagcctgggagacagatcgagactgtctcaaaaaaagaaaaaaaaaaaaagggaaggaaaccctgacacaggtcacagtgtggatgcatcttgaggcaatcccgctcagtgagagagccagacacgcaaggacaaaccactgtgtgacccactcctaggaagtccctagagtcatcaggttcacccagacagtaggatgggaggtgccaggggctggggaggggggtgaggagtgagtgtttcatggggacagaatttcagtttgggaagctgagaaagttctggagatggtggtggtgatgggtgcacaattatgtggatgttcttaatgctagtgaactgtgtgtacttaaaaacagttaagggcccaccgggcaccgtggctcacaactgtaatcccagcactttgggaggccgaggcgggtggatcacctgaggtcaggagttcaagaccagcctggccaatatggtgaaaccttatccctactaaaaatacaaaaattggccgggggcagtggctcatgcctgtaatcccagcactttgggaggcctaggcgggcggatcacgaggtcaggagattgagaccatcctggctaacatggtgaaaccctctctctactaaaaaatacaacaaaaattagccgggtgctaatttttggtggtgggcacctgtagtcccagctactcggtaggctgaggcaggagaatggcgagaacccgggaggcggagctttcagtgagccgagatcacaccactgcactccagcctgggcaacagagtgagaccctgtctcaaaaaaaaaaaaaaaaaagtgtaaagaaatagaattaaatattattctgataaaacacaagatgaaagacacaccatgtcatacccattaggatgggtatgtcaaaaaactggaaggtggccgggcatggtggctcacacctgtaatcctcacactttgggaggccacggcgggtggatcacctgaggtcaggagttcgagaccagcctggccaacattgtgacaccccgtctgtactaaaaatacaaaaattagctgggcgtggtggcacgtggctgtggtgtcaggtacttgggaagttgaggcgggaggatcacttgaacccgggaggcagagattgcggtgaaccaagatcatgccactgcactccagcctgggtgacagagcgagactccatctcaaaaaaataataagaatgaaggaggctgggcatggaggctcacacctgtagtcccagcactttgggaggccgaggtgtgtggattgcatgaggtcaggagttcaagatcagccagaccaacatggtgaaaccccatgtatactaaaaatacaaaaaaaaaattagccgggcgtggtggcgtgcacctggagtcccagctacctgggaggctgagaaaggagaatcgcttgaacccaggaggcggaggttgcagtgagctgagatcgtgccactgcactccagcctgggagacagagcgatattgtctcaaaacaagaaaaaaaaaaaaaggggaaggaaaccctgacacaggtcacagtgtggatgcatcttgaggcaatcccgctcagtgagagagccagacacgcaaggacaaacactgtgtgacccactcctaggaagtccctagagtcatcaggttcactgagacagtaggatgggaggtgccaggggctggggaggggggtgaggagtgagtgtttcatggggacagaatttcagtttgggaagtcgagaaagttctggagatggtggtggtgatgggtgcacaattatgtggatgttcttaatgctagtgaactgtgtgtacttaaaaacagttaagggcccaccgggcaccgtggctcacaactgtaatcccagcactttgggaggccgaggcgggtggatcacctgaggtcaggagttcaagaccagcctggccaatatggtgaaaccttatccctactaaaaatacaaaaattggccgggggcagtggctcatgcctgtaatcccagcactttgggaggccgaggtgggtggatcacctgaggtcaggagttcaaaaccagcctggccaatatggtgaaaccttatccctactaaaaatacaaaaattagccgggtatggtggcgggcacttgtgatcccagctacttgggaggctgagacaggagaattgcttgaacccgggaagctgaggttgcagtgagccgagatcacgccattgcactccagcctgggcgacagagcaggactcttgtctccaaaaaaaaaaaaaaaaaaaaaaaagagcactcaccccttgggggtgctgtgaagattaaatgagttaatttaagtacttatgataatgcctggcacctagcaagtgctttatgtttgctaggtgtttttttgtcgttgttttaatttaaattaattttattttttttgagatagggtctcactcggtcgcccagactggagtacagtggaccaattataactcattgcattcttgaactcctgggctcaagcaatcatcctgcttcagcctcacaagtagctgggactacaggcacgtgccaccatgcctggttaattttttatgttctgtagagattatgggggcgtgtctcgctatgttgcccaggctggtctcaaactcctgagctcaagtgatcctcttgccttggcctcacaaagtgctttacaaaattaatacaaaaattaaccgggcgtggcagtgcacacctgtaatcccagcttttcaggaggctgagacacgagaattgcttgaacctgggaggtggaggttgcagtgagccgagatcataccactgcatcgcagcctgggtgacagagtgagactctgtccaccttcccctgcgtcccccacccccggcaaaaaaaaaagtcaggcttggtggtgcacacctatggtcctagctactcgggaggttgaggtaggaggattgcttgagcctggaagttcaaggctgcagtgagtggtgattgtgccaccgtactccagcctgggcaacagagccagaccctgtctcttaatgtttaaagaaatagtttctagaattaaatattattctgataaaacacaagatgaaagacacagcatgtcatacccattaggatggcgactgtcaaaaaaccaaaaggtggccgagcgtggtggctcacacctgtaatcctcgcactttgagagggcaaggcgagtggatcacctgaggtcaggagttcgagaccagcctggccaacatggtgaaaccccatctgtactaaaaatacaaaaattagctgggcgtggtggcacgtggctgtggtctcaggtacttgggaagttgaggcgggaggatcgcttgagcctgggaggcagagattgctgtgaaccaagatcatgccactgcactccagcctgggtgacagagcgagactccatctcaaaaaaataataagaatgaaggaggctgggcatggtggctcacacctgtaatcccagcagtttgggaggccgaggtgggtggatagcatgaggtcaggagttcaaaaccagtttgaccaacatggtgaaacgccatgtgtactaaaaatacaaaaaaatttagccgggcatggtggcatgcacctggagtcccagctacctgggaggctgagaagaatcgcttgaacccgggagggggaggttgcagtgagctgagatggcaccactgcactccagcctgggcgacagagcaagactctgtctcaaataataatactactaataatagttaaatgaaaatggttaagatgacagcttttatgttatatatattttagccatttttttttaaaggcacagggcagacagggctcttagttaggttctggggtagggggctagaaaggcccgtggcatgaggggagggtaggccgaagtggggtctgaggtcaggggccttgaatcccagggagaggctggggcctggactcaggggtccctgggagccacaggaggctgtagagcaggggaggagccagggaaggaaattctgaaggaaacagggccgtgccctgaacacacgtggaatccgggtgttcgctgagtcacaaatcctggaagctcagggtcgtgaagaggaagtccagccgcgctatgcgaggtcttcctgtttttggagggggcaggcaccccagggccgattgtcgcgaatcaccttcacctctgggggctcagaatccctgagccagaaggccagggcagggctgggggatacccctgctgctcagacaggaaaatgggctcggagcttgcccaatacttcccagaaggacgaggctgctgaacttctcattcggggctccgggacctggactgtacccctttctggtagggggtgctctgaactgggaccttcagcatggagggcgggggttcagagggtgaattccgctgctatgtcattacctggatgggagagtgtctccactccacacacctagaagtttctgcaaagttaccttgaatgggagtgggaagcagtcccccgtgagaggtagtgaggtgcctgtcatggaggtgtgcaagcggagaatgaaaaggctggatttgggaaggaggtcagatctaccagggtcacagaggcccttggcatggggaatattctgtgattctgtggttatgtagtactgtcattcccagcttgtggctttttttttttttttttggatggagtcttgctctgttgcccaggctggagtgcagtggtgcgatcttggctcactgcaacctccacctcctgggttcaagggattctcctgcctcagctctccagtagcagggattacgggcacaggccaccatacctggctaatttttgtatttttttgtagagacagggtttcgctatgttaggcaggccggtcttgaactcctgacctcagatgatcctcccatctcggcctcccaaaatgttgggattacaggcgtgagccaccacacacagccagcttgtggcttataaaattccaagagcctttgactctttttttttttagcctttgagtttaatatttttgtgttttaattctaagtatttttatgcatgtattttgcgattgcatttttaaatatatgttttaggatatttgtatctattattataataattattattagttttaaattaccgaatgcagttttgtttgaagtcgtttcctgggctttcacgcacacgtggccataaagttgttctgataattaaatcagtgctgtgtattattattattattgccattattgtttttattaattattatccccgtgaggaatttttctgggatttgaaggagcgtctgctgctctcgcccgccgtcttgtggccacgagcgggactgcaggccgctcacctcgccgccccttgcccgcaggcgtcacctcctcctgtcgcctggccctcgccatgcagaccccgcgagcgtcccctccccgcccggccctgctgcttctgctgctgctactggggggcgcccacggcctctttcctgaggagccgccgccgcttagcgtggcccccagggactgtgagtctgggggtgtctttgggcgggggtggagtcccgtgggagtatctgggttcccagttgggtctgctgcccccactgggggactcaagcagtccaggagccacccctagaaggggcatgacctcaggccaccctctcttcacccccagcccttgctcacacccctctccaccccctcactcagacctgaaccactatcccgtgtttgtgggcagcgggcccggacgcctgacccccgcagaaggtgctgacgacctcaacatccagcgagtcctgcgggtcaacaggacgctgttcattggggacaggtattgctggggacagcaaggaggcctgtgtgacgagcagaatgagcgagggggagagagagaggaggcgagggcagggaggggatggagcaggtcgtgcagggcctgttgggccattgggaggacttaggctttgacccggaggaaggtgggagccacggagggttttaggtaggggaaggactggacctgactcaggtgctcacacgcgcccgccctctggtggctgcttctgggagggggcgagaatggaatccaggggaccagggtggaggggactgggctgtccaggctggctatgattgaggctggaccaggtggaagctgtcgtggggagaagcaagtgtgagattacggggcttctagggatgggcttcccaggaaggagagagaccggacagatcaaatgctttggagaggatgaggaggatgcggaagtgaccactgggcttaactacacgaggtcaccaatgacgttgagcagggcggcttcctcggcaagggtgtgaggggagagagcctggtgggcgcctgggaggcgccgagtggggcacctgacctaaggccatgggacatggtgttgggggcagtccgtggggcgtgccgggcaggaggtggagtgcaggatatgaaggcctgctggggcccttgggggggtgtggtcggcgctagagttgctcgtgtcagaggcattggcatggccctgcatgcccccgtgtgcacaccacattggcagtgggaaggatggaacgggagagggtggcggagcccccagttctcactaactatgcccctcccccagggacaacctctaccgcgtagagctggagccccccacgtccacggagctgcggtaccagagggtgaggaaggggtgcaggtgggagtggaggggtagggccagggggacgcggcactgcgccggggagctgggtggattcggcccagcacggcggggtcactcagggctgctgggacccgttaccccctcaccagctctctctgtctgcagaagctgacctggagatctaaccccagcgacataaacgtgtgtcggatgaagggcaaacaggaggtgagttggccctggctcggtcccggcccctgcgaatcagccctggcattacccatgccccgccccaatcagaccaggccacgcccaccccgccagccctggccacgccccaacccacccccaatcagccctggccccgcccaactgccagccctggccacacccccaaacagccatggccacgtccacgtccccacccaattggtcctagcccggcctccagcctagccacaattatccataaccacgccccaaatagttctggctatgcccacacttctgcccctgtcagtcctaccaccacccccagcctcgttccaacaagcccaggccatgttcacacgccacccaatagctcactccccacccaatcgatcaggtccccatcccgacccctcccctatcagtcctgccgccccccacgcccccggcccgccccaataagcccaggccacgcccaccccaccagctctggccacgctcccaacttggccccaatcagctataaccgtgcccaccacgccccagttagttctggtcacgaccatgccccaccccaatcggccgtgaccacacccagggcggatccttctcctccatcccaggttaggactctgctattgccatggttatgcccacagtctgacaatgcccaccatcctggccttgcctgcgttgctgatacaaagtgtttccctgtctgggtcgcaccgtgtccccagccagtcctaggttcagcccctgccttggccatgcccacaacagaccggccctccacccacacaactcaggttctggccacgcccatcaccatgaccacgcccacatcgcgctccccgcttcctcctgtccccacctcagggcgagtgtcgaaacttcgtaaaggtgctgctccttcgggacgagtccacgctctttgtgtgcggttccaacgccttcaacccggtgtgcgccaactacagcgtgagtcttcagactccctgcgccccaggtccaacctccaggcctctgctcgcccgacctccgctggccatggcttttccccaggccgtgtcacctcctccaggaagccttcctggatatactctccctgcctcctccccctgagctcaagaggagtcagcgctgtccaaacgaggcctgtacagggggccggggaagccgtagctacttaggtaatgagccagttacaggtctaactaggcattgactcttaaacccatttacagatcagtaaactgaggccctgagaggttaagtgagtggccaaggtcacacagtaatccgtggtggatcaggattccccctggagtggggggctgagggagccaggggctgctaggtggggtcaggagatctgtcactcaggccccatggtccctgcagatagacaccctgcagcccgtcggagacaacatcagcggtatggcccgctgcccgtacgaccccaagcacgccaatgttgccctcttctctggtaagtacccccccaacctccatctgatcagccccagccacaggcaagacctggcattttctactccagcgtctgggttgtttagaaggcagctggacgaccacttgtcccagctgtgacatgggcagactctcagcccaggtttggggctcagctgggattgaggctcagcgggatttggggcttagccggggtcaggggctcagttaaggtcagggcttggatggaggtggggcttggatgggatcagggctcagcctggagacaggggctcccctaggctcaggactcagtctcagaaaatcgagtttcgacccacccagcccctggcctctgcggtctcatctcttgcctgccttccccacccaccccatccagacgggatgctcttcacagctactgttaccgacttcctagccattgatgctgtcatctaccgcagcctcggggacaggcccaccctgcgcaccgtgaaacatgactccaagtggttcaaaggtgagaccaggaagggcagtgggcccagacctggcagggcccagaacctgacattcatcaaatctccccaccagaataagagtcccagaggagcttggtggagagatttccaccacatctttggaatctgttggcctttttgaagactagaaagctagaggaacaagtttagttggatctaaagtagaacccgctggaagtgggtggcttagaagcccaaaatggaaccacagaaaagatatagcaggactcagctcttcaacacatgagggaggaagataacaaaaaatagttgatgttgccatttgcagcaagagacacagcgattttaggcttctgacctcccttcccctgcaaaataccaaactttgagtctgtttcatattgtctgggtaaccagcctatgtccccccttcaccataaaagccagtgagttcttagccccagaaaccccctttgtcatgtcaggggctgagttctgacccctcctgtcctgcagagccttactttgtccatgcggtggagtggggcagccatgtctacttcttcttccgggagattgcgatggagtttaactacctggagaaggtgaggccggtgcagtggggcatgaagttgagaggctctgatcatgcgaagtgagggggcagaggtggatccatgaatccctgcatggggtgagagggtcctgccctccatttctggtccccagggcctcctttccagccatgatcaggccctgaggctgaagacatctacggagcagccgtggagcactcagccctgacgagggacttgagttggaagtcagatacacctggtgctgttgctgttcacctgtccacccacccacccagccacaatcacttatccatccttcatcccctgtccatccgtctacctgctcaccctcccacttacccatctgtctgttcttcagcccacccacactttcatgagcccattaatccatctactcatctgcccacccactcactcatccacccactaccatccatccgtgcactcatccatctgtccatgcatccatccacccatcgattcatctagccacccttccatcctatccatctatcagtccatccacctatccatccatctatccatcatctgtccatccatctgccaatccattcacccatccattcatccatccatccatcccatccacccatccatccatttatctacccatccaccaacacacccacccacccacccacccatccatccatccatccatccacacatccatccatccatccagctgccaatccatccacccatccattcatccatctacctatccacccacccatccatccatccttcatctatccatccatctgccaatccatccacccttccatctcatctatccatccatctcattcacccactcatcatctatgcacccacccatctatccatccatttatctgcccatccacccacacacccatccatccatccatccatccatccatccatccatccatccatccactcacccatccaaccatccacccatccaactcacctatccatccatccatccatccatccatccatccactcacccatccaaccatctacccacccaactcacccatccatccatccatccatccatccacccacttatccatccattcattcatccacttattcacctatccatgcatccatccatccactcacctagctttctctctatccatctgttcatccatccacccacacatccatctacttatctaccaattgcttgattaccttgttctccttcaccatctcttccattatctatcatccttcttcagatgtatttatttatccatccacctactcatccctccattgtaatcgtccgtccatctactcatccactcatccgtccatccaggcaaccaggcagtgctgaagtgcacagactgccactaactactattgtgaccttggaccagtcacttccttttatctgtgcctcttatcagtgtccccacatgtacaatggggggatatcagtaggcccccctcgggaagagtgtaagagatgtgagaataaaatgtgggtcttcgtggaaacagtgatgattatggttgtcactgttgctattatcatcattgacattcccaccgggaatttctgccagggaagccggtgcccagagaggaacggtgactggccggggtcccaccagagccagggtcagactcctccatcacagtttgggtggtgagtggcacagcctgtgaacaggccttcctgggacacagagctcaggcccccgtccgtccactgtcacgcccaggtggtggtgtcccgcgtggcccgagtgtgcaagaacgacgtgggaggctccccccgcgtgctggagaagcagtggacgtccttcctgaaggcgcggctcaactgctctgtacccggagactcccatttctacttcaacgtgctgcaggctgtcacgggcgtggtcagcctcgggggccggcccgtggtcctggccgttttttccacgcccagcaacaggtcagcgcccaccaatgggagcaaactgggagcatttggtgggcatgggtagagagggcctgtattcactcctcaggtatgccctgggtgctaggttgggcaccactggattagacctctgagaggcctcggccccaggctggggtgggacaagctgacactgaccctctaagtccctttggtcagaactgggccaaagatatcctcatcctctgcctttggggagaggagcagggagggcttcctggaggaggggacattggagctggactttgggtgtgagatggaggaagagggaagggtgttcaaagttggagaaacagcatgtgcaaaggtcctgaggcttcagtgagttcagtatacttaagtaatcgtgagagagtctgtgtgggaagggaactaggggagaatgcacaacaggaaagcagggaactggtaggatggatcaggcaaggctttgtgggctgcaggcagaaacttggactttttccctgagagcactggggagccatggaagagtgaagagcaagagggatgagatcaggtttgcattttttgtttgtttgtttgtttgtttggtttggttttttttttgagacagtttcactcttgttgcccaggctggagtgcagtggcgcgatctcggctcaccacaacctctgcctcctgggttcaagcaattctcctgcctcagcctccctagtagctgggattacaggcgtgcgccaccacacccagcttattttgtatttttagtagagacggggtttctccattttggtcaggctggactcaaactcctgacctcgtgatccacccgcctcagcctcccaaagtgttgggattacaggcgtcagccaccgcacccggccaaggtttgcatttttaaaaagcctgcttgtggactgggcacggtggcttcgcctgtaatcccagcactttgggaggctgaggagggcagatcacttgaggtcaggagttcgaaaccagcctggccaacatggtgaaaccccatctctactaaaaatacaaaaattagctgggtgtggtggtgggcacctgtaattccagctactcgggagactgaggcaggagaattgcttgaacctgggaggtgtaggttacagtgacctgagatcacgtcactgcactccagcctgggcgacagagcaagactcggtctccaaaaaaaaaaaaaaaagcctgctggggagtgggctctaacagtgacactgggcaggcaggacatccagttaaacagggatgggggcctggacaggggtggcctcgtagaccctgaactgtggcccaatctgagatgttattcaggaggagtggctgcattcgacagatgcgggagggacaggggacatctctggcctaggaagactgaagattcactggctcctgcagacagaggctcctgcacgcacttgtccgagatggggcctcccaccgggctcaccaaactctttcatcccaacccctcagcatccctggctcggctgtctgcgcctttgacctgacacaggtggcagctgtgtttgaaggccgcttccgagagcagaagtcccccgagtccatctggacgccggtgccggaggatcaggtgcctcgaccccggtgagaaccccctccatcctgagtcacatgcccggatgaggtcctgatccccagggccgagggctggggcttccgggtggttatttagctgatgctgagttcagctgtacccgttatacagttgggaaaaactgaggcctggtgtggtggctcacgcctgtaatcctagccctttgggaggcggaggtgggcagatcacctgaggtcgagggtttgagaccagcccgaccaacatggcgaaaccctgtctctactaaaaatacaaaaattagccgggcgtgatggcacgtgcctgtaatcccagccactcgggtggctgaagcaggagaatcgcttgaacccaggaggtggaggttgcagtgagccaaagcactccagcctgggcgacagattgagactctgtctcaaaaacaaaacaaacaaaaaacctgagggtcgttgggcaaagcaatgggtacctctggtgaatcaggcccctttatgagaacctttacgttcgtcctgaccacacccttgtcacccccaggcccgggtgctgcgcagcccccgggatgcagtacaatgcctccagcgccttgccggatgacatcctcaactttgtcaagacccaccctctgatggacgaggcggtgccctcgctgggccatgcgccctggatcctgcggaccctgatgaggtcggtcctggagaggcagggcatggcgaggggagacaggatggggtagatggagggtgagaggatccagatgctcaacacagatgagcccatggcttccggcgctgcccagagagctggagacacagagagacagagagggaaagatggagagacactaggaaagagagaacaaagagagagacagagggatcaagaggtgacagatggggctgggcacggtggctcatgcttgtaatcccagcactttgggaggccgaggctgccagatcacctaaggccaggaattcgagaccaccctggccaacatggagaaacctcgtctctacttaaaatacaaaaattggccgggcatggtggctcacgcctgtaatcccagcactttgggaggccgaggcaggcggatcacgaggccaggagatggagaccatcttggttaacacagtgaaaccccgtctctactaaaaatacaaaaaattagctgggcgtggtggcaggcgcctgtagtcccagctactcaggaggctgaggcaggagaatggcatgaacccgggaggcggagcttgcagtgagccaagatcacgccactgcagtcccgcctgggcgaaagagcgaaactccgtctcaaaaataaaataaaataaaatacaaaaattagccaggcgtggtggtgggcgcctgtagtcccagctactcgggaggctgaggcaggagaatcacttgaacccgggaggcggaggttgcagtgagccgagatcacgccactgcactccaacctggggccagagggagactacacctcaaaaaaaaaaaaaaaaaaaaagaggtagacagacagacacacaccaggagaacaaagggggaaagagacagagagacagggagagagacaatcagagacagacagacacccagagagacagagatagggaagagagacaaagagagaaagagactgaaagatacacagacacacatacatatcaggagaaagcggggctgggcacagtggctcatgcctgtaatcccagcactttgagaggctaagacgggaggatcacttgaggtcaggagtttgaaaccagcctggccaaatggtgaaaccctgtctctactaaaaatacaaaaaaaagaaaatcagctcggtgtggtggtgtgcgcctgtagtcccagctacttgggaggctgaggcaggagaatcgcttgaacccaggaggcgagatcgagccactacactgcagcctgggcaacagagtgagactctgtctcaaaaaaaacaaaacataaacttgccaggcgtgatggcgtgtgcctgtagtccctgctactcaggaggctgaggcaagagaattgcttgaacccgggaggcggaggttgcaatgagctgagattgcgccactgcactccagcctgggtgacagagtgagactccatctcaaccaaagagacagggctgaggagagcctggtttggggttatgtttcaaaaaagggcgagtgtgcccacgtgcctgtgtagtcacgcatgtccccggcatccatgcacacacgcatttattgctgtcacatgtgttggtgtgtcagtgtctgtatgcacccgtgtaactatggccatgcccgtgttggtggcatgtggtgatatggggccagcctgaccctcccctgccctgtcccccaggcaccagctgactcgagtggctgtggacgtgggagccggcccctggggcaaccagaccgttgtcttcctgggttctgaggcggggacggtcctcaagttcctcgtccggcccaatgccagcacctcagggacgtctgggctcagtgtcttcctggaggagtttgagacctaccggccggacaggtaagtctgggcaaaggtgggaaggggtcgccagcaggaggggagatgggctgagatgcgctcagcctcaccactctgcttgtccccaggtgtggacggcccggcggtggcgagacagggcagcggctgctgagcttggagctggacgcagcttcggggggcctgctggctgccttcccccgctgcgtggtccgagtgcctgtggctcgctgccagcagtactcggggtgtatgaagtgagtgtccaccccaggccagccgtgggcgggaagcaagggaggatgggcacagggagggacagctgggttccagtcaaaagcccaatgatgtcctggtcattgagctgggcagagggcatggcccgtgcaaaggcccgcgggcaggaccactcctggtgtgttggaagaacagcaaggtggccggtgtggctggagcacagtgagcaagggggagtgagggaggaggggaggacggggaggggatgggagaggacgaggcagtttgtgcagagctttgtgagcctcggggaggacttgggctttgaccttgaaggagatgggagccatgtagggttgcaggcagaggagggactggccctgactcaggtgcttacaggtgccctctggtggctgctgccaggaggagactgcaggggaaggagaaccagggaccagggtggaggctgtttccccgtctctaaaatgggaggaaagctaggatgcatgccagtgctggcacacgcctgcactccatgtgagccgtcaatgcggaggaccctgcttcctgcccgccgttattgcaacaatgacccagtagctccgagtccaagggcacagcctctggcacgatgcctgggctcccatctcagctctgccacttgggcaaacatttactttctggagcgtcagtttgcttatctgtaaagtggggagtgaacagtgccctgcacacagatttgttctaaggactccagaagttgctattaagaagagggactgggcttggtagctcacgtctgtcatcccagcacttgggaggccaaggcaggaggactccttgagccgaggagttcgagaccagcctgggcaacacagcatagtgagagcctgtctctaaaaaaaaaaaaaatgcaaaaatcagctgggcgtggtggcacacacctgtggtcccagctacccagaaagctgaggcaggaggatcacttgagcctgggaggttgaggctgcagtgaactatgatcatgacactgtactccagcctgggtgacagagcatgaccctgtctcttaaagaaaaaaaaaattaaattttaatttaaaaaaatttttttaattttaaaataagaaaacgccagccgtggtggctcacacctgtaatcccaccactttgggagtccgaggcgggtggatcacttgaggtcaggagttcaagaccaacctggtgaaaccctgtctctgataaaaatgcaaaaattagctaagtatggtggcgcgtgcctgtaatcccagctactcggggggctgaggcaggagaatcgcttgaacccgggaggcggaggttgcagtgaaccaaaatcccgccactgcactccagcctgggcgacaagagcgaaattccatctcaaaaataactaaataaataaacaacaagagcgaaattccgtctcaaaaattaattaattaaaataaaaataaagaggcaggtgcttggaacagggcccacaggtcaccatcaccattggggttgtgtaagtgacttggacacttgtcccattcggtccctggtctgctctaggaactgtatcggcagtcaggacccctactgcgggtgggcccccgacggctcctgcatcttcctcagcccgggcaccaggtactgcgggagagggaggtgggtggagggtgtgtcagacccgcccatgatcccagatccccctgatctctgactgtgagaggggcctctgctgacggtgcctcctctccccattagagccgcctttgagcaggacgtgtccggggccagcacctcaggcttaggggactgcacaggtgagttggggggacggcaggctaagacccccatcccccactaccatgggggaggggagggaggaggctggaggaccctcgaatcctctgggaggtgggtggggaaactggactccatcagagaactttagaaaggcatggggtgggccgggcgcggtggctcacgcctgtaatcccagcactttgggaggccaaggtgggtggatcacgaggtcaggagatctagaccatcctggctaacacggtgaaaccccgtctctactaaaaatacaaaaaattagccgggcgtggtggcgggcgcctgtagtcccagctactcgggaggctgaggcaggagaatggcgtgaatccgggaggcagagcctgcagtgagccaagatcacgccactgcactccagcctggacgacagagcaagactccgtctcaaaaaaagaaaagaaaggcatggggtggtctcatctcatttattggggagggagataggggaagaacagagacaccaagaaacaggcaggctttggcaaggacgaagagacaacagaaggcagacagaccaacttcaacaggacagaaggggccaggcgcggcagctcctgcctataatcccagcattttgagaggccaagacaggacgatcacttgaggtcaggagtttgagaccagcctggggaatatagtgaaaccctgtctctaaaacaaaaacccaaaaataatccagacgtggcagtgcatgcctgtagttccagctacttgggaggctgaggcgggaggatcgcttgagcccagggaggtggaggctgcaatgagctgtgatcaggccactgtactccagcttgggcaacagagtgagaacatgtcttttttttttttttttgagacagagtcttgctctgtcacccaggctggagtgcagtagtgtgatctcagctcactgcaacctccacctcccgggttcaattgattctcctgcctcagcctcccaagtagctgagattacaggcgcacaccaccatgtccggctaaaatttgtatttttagtagagatgggtttcacttgttggccaggctggtctcaaacttctgacctcaggtgatctcctgcctcagcctcacaaaatgctaggattatgggtgtgagccatcatgcctggcccagatcctgtctttaataaaacaaacaggtagctggaggcagggttgcagtgagctttaccactgcactctagcctgggggactgtctcaaaacaaacaaacaaaaaaaattaaaaaataataaaaataaggccagtcgtggtggcttatgcctgtaatcccagcactttgggaggcagaggtgggcggatcacaaggtcaggagttcagaccagcctggccaacgtggtgaaaccccatcctactaaaaatacaaaaattagccgggcgtggtggtgggcacctgtggtcccagctactcgggaggctgaggcaggagaatcacttgaacatgggaggcggaggttgcagtgaatcgagatcgccccactgcactccagcctggcacacaaaggaagactccttctcaaaaaataaataaataaaaaaaaataaaaataataaaaaagaggacagagggccccgaggaggtaggagggatgcccagggccaccccgccggccccactaacccccctgtgctccccggccaggactcctgcgggccagcctctccgaggaccgcgcggggctggtgtcggtgaacctgctggtaacgtcgtcggtggcggccttcgtggtgggagccgtggtgtccggcttcagcgtgggctggttcgtgggcctccgtgagcggcgggagctggcccggcgcaaggacaaggaggccatcctggcgcacggggcgggcgaggcggtgctgagcgtcagccgcctgggcgagcgcagggcgcagggtcccgggggccggggcggaggcggtggcggtggcgccggggttcccccggaggccctgctggcgcccctgatgcagaacggctgggccaaggccacgctgctgcagggcgggccccacgacctggactcggggctgctgcccacgcccgagcagacgccgctgccgcagaagcgcctgcccactccgcacccgcacccccacgccctgggcccccgcgcctgggaccacggccaccccctgctcccggcctccgcttcatcctccctcctgctgctggcgcccgcccgggcccccgagcagccccccgcgcctggggagccgacccccgacggccgcctctatgctgcccggcccggccgcgcctcccacggcgacttcccgctcaccccccacgccagcccggaccgccggcgggtggtgtccgcgcccacgggccccttggacccagcctcagccgccgatggcctcccgcggccctggagcccgcccccgacgggcagcctgaggaggccactgggcccccacgcccctccggccgccaccctgcgccgcacccacacgttcaacagcggcgaggcccggcctggggaccgccaccgcggctgccacgcccggccgggcacagacttggcccacctcctcccctatgggggggcggacaggactgcgccccccgtgccctaggccgggggccccccgatgccttggcagtgccagccacgggaaccaggagcgagagacggtgccagaacgccggggcccggggcaactccgagtgggtgctcaagtcccccccgcgacccacccgcggagtggggggccccctccgccacaaggaagcacaaccagctcgccctccccctacccggggccgcaggacgctgagacggtttgggggtgggtgggcgggaggactttgctatggatttgaggttgaccttatgcgcgtaggttttggttttttttgcagttttggtttcttttgcggttttctaaccaattgcacaactccgttctcggggtggcggcaggcaggggaggcttggacgccggtggggaatggggggccacagctgcagacctaagccctcccccacccctggaaaggtccctccccaacccaggcccctggcgtgtgtgggtgtgcgtgcgtgtgcgtgccgtgttcgtgtgcaaggggccggggaggtgggcgtgtgtgtgcgtgccagcgaaggctgctgtgggcgtgtgtgtcaagtgggccacgcgtgcagggtgtgtgtccacgagcgacgatcgtggtggccccagcggcctgggcgttggctgagccgacgctggggcttccagaaggcccgggggtctccgaggtgccggttaggagtttgaaccccccccactctgcagagggaagcggggacaatgccggggtttcaggcaggagacacgaggagggcctgcccggaagtcacatcggcagcagctgtctaaagggcttgggggcctggggggcggcgaaggtgggtggggcccctctgtaaatacggccccagggtggtgagagagtcccatgccacccgtccccttgtgacctcccccctctgacctccagctgaccatgcatgccacgtggctggctgggtcctctgccctctctggagtttgcctcccccagccccctccccatcaataaaactctgtttacaaccaccggcccccatgactctggctctgctctgcctcctgggggtggcacgggtgggggcaccctcaaaagtcaaggccaggccgggcgcggtggctcacgcctgtaatcccggcactttgggaggccgaggtgtgcagatcacttgaggtcaagagttcgagactagcctggccaacatggcaaaaccccgtctctactaaaaatacaaaaaatcagccaggcttggtggcgggttcctgtaattccagctactcggccgactgaggcagaagaatagcttgaatctgagagtcagaggttgcagtgagctgagatcacaccactgcactacagcctgggtgacagagcgagacgctgtctcaaaaaaaaaaaaaaaaaaaaggctgggtcaaaacaaatctggggagctgagtgtggaaacatggagacttcggggtccccatcttcatctgcataggagccagtttctttttctttttctttttctttttttgagacagagtctcactttgtcacccaggctggagtatagtggcgcgatctcggctcactgcaacctatgcctcctgggtgcaagcaattctcctgtctcagcctctccagtagctgggactacaggcacccgccaccacgccccgctaatttttgtatttttagtacagacggggtttcatcatattggtcaggctggtctcgaactcctgaactcaggtgatccgcttgcctcggcctcccaaaatgctgggattacaggcgtgagccactgcgcctggccagccttatgaattttgttttaagtgggacaagaagccatcagagagttttaagcagggatgtgatctcatttcattttaatggatcgttttgttactgtgtcactacatttcacaagccttccttcctctcagtccatgttgattaagaccaactaacggctgggctccggagactgggcagggcacaagactgacggagtgcagtggctcacgtctataaccccagcactttgagagactgagaagattccttgagcccaggagtttgagaccagcctaggtaacatacaaaagaattttttaaattagccaggcatggtagcatgtgcctgtattcccagctactcgggaggctgaggcaggagaatcgtttgaacccaggaggtggagcttgcagtgagccgaaattgcatcactgcactccagcatgggtggcagagggagactccatctcaaaaaaaattagccaggcatggtggcacgtgcccgtagtcccagctacttgggaggccttggacccatggtcaaagctacagttagctatgattgcaccacactgctccaagctgggtaacagagcaaaatgctgtctcaaaaaaaaaaaaaaatgacggggcatggtggctcacacctgtaattttagcagtttaggaggccgaggccagtggatcacatgagctcaggagttcaagaccagcctgggccacatggcaaaatcctgtctctattaaaaatataaaaattaaccaggcacgctggtgcatgcctgtagtcccagctactcgggaggctgaggtgggagaatggcgtgaacccgggaggcggagcttgcagtgagtggagatcacgccactgcactccagcctaggcaacagtgcaagactctgtctcaaaaaaaaaaagaaaaaaaaaatagtcatagctgcagataaaggtgacaccatcatacctaaatatttagaactcaacaagaatgcaagcactctgcagccaagtccatgagatgcagccaaagctgttctcaaagggaaatttgtagcctccaaacgcatttaataggaaatgaggaagaatggaaacaatagcatggatgtcagattcagatgaagagaaaaaagggcagaaggagcccttggagatttgagttcagcttcatagatggggaaactgaggccaagaaaagttaagtcacttgccaaaggtcacaaagcaaaggtgttcatgacagagctggaattcagaaccaggtttggttcctcccaagccactgtctaaggaccgtagagacgtttggcattactcactattggactgtatttttaaaatgacttcttttaaaaaaagcaatatcaacataccatgaaatcaagacgagtttttttgttcttttcagtgagcttctgggttgctcaagtttatggtaaatccctcctcttgctcagagagctgtccctgtctccaggaatagtgccttgcaaaccttgacccttgaactccgggttgggggaagtgaggatgcaactagagagactcttggatgccccccaaaaatcaggaagcaaggaaagaaaaacctgtgttctagaagcagggtcaaaaaggggttgaacaggaaacaatttccaggaagcaattttgtaatcctgacccctccccttcccctgcctggcttaggctcagcccctatcaggaactggacgggggtggggacttccccagggttggttcccctgcccccagtccaggcaggtataaggccacctccgcaggccaggacaacccagaagcaaaagagcagagctaccatgtcctcttggagcagacagcgaccaaaaaggtaggtccccacactacctgtcctaggcaggtttgaacgccagaccatgcggagatacaggacattccagctaacccatagaagtcacagggagcagatacaggcctggtggctggcacagatcaaccttatctgtgacagaaagactggcgcgtgcacacacacacacacccctacagaagcccaggtgggcatgggcagcagggagccgggggaggcttcttgttagaggcctggggccacagtgaccaaggctgtcgagatcatgtctgatggctgccgggccagggaagccctggaggaggaggggaagccccaggcttccaagggttgtggtgctaagtgtaaaccaccgcttcccaaggccaaatgcccaccctcagacctggccaaagcaggacacacttttcatgttcagaggctgcagtgagctgtgatcatgccagttccctccagcctgggcaactgagcaagactctgtctcaaaaacatgaacctgaacgtctgtcttcctccaagcacccaattggtcaagagtggacaaaaagaccaggatcccagagcagagaagtcttcatggaaaagagggcattggagctggggctttgaaggatgaataggagttcacatcaaaacacagagccagggagacaaggactgacccagaaaataagccagatcagaagaaactagcaagttggactgtgaataattaacagctcatgggggctaggctggtgatggggaagtgtattcatattatgcgggagttacactcagaaactcaactttcctagaattataattctccctggaacaggggccacttctggcagctgtcgggggtgagggtagaagctggaagaggaggaggaagcaactgccctagtacaggtgagagatgaggtagcatagtccaggctggtagccgcagagatgggaagaagtgggcggatttgctggtgtattttcacctagctgagtgtattttcactgtggtttagtaagcatcttctgttactgcctgcagcccagggggcattcaaccccatgtttctagaactctgttcctgctgctgctgttggcagcctcagcctggggggtcaccctgagccccaaagactgccaggtgttccgctcagaccatggcagctccatctcctgtcaaccacctgccgaaatccccggctacctgccagccgacaccgtgcacctggccgtggaattcttcaacctgacccacctgccagccaacctcctccagggcgcctctaagctccaagaattgcacctctccagcaatgggctggaaagcctctcgcccgaattcctgcggccagtgccgcagctgagggtgctggatctaacccgaaacgccctgaccgggctgcccccgggcctcttccaggcctcagccaccctggacaccctggtattgaaagaaaaccagctggaggtcctggaggtctcgtggctacacggcctgaaagctctggggcatctggacctgtctgggaaccgcctccggaaactgccccccgggctgctggccaacttcaccctcctgcgcacccttgaccttggggagaaccagttggagaccttgccacctgacctcctgaggggtccgctgcaattagaacggctacatctagaaggcaacaaattgcaagtactgggaaaagatctcctcttgccgcagccggacctgcgctacctcttcctgaacggcaacaagctggccagggtggcagccggtgccttccagggcctgcggcagctggacatgctggacctctccaataactcactggccagcgtgcccgaggggctctgggcatccctagggcagccaaactgggacatgcgggatggcttcgacatctccggcaacccctggatctgtgaccagaacctgagcgacctctatcgttggcttcaggcccaaaaagacaagatgttttcccagaatgacacgcgctgtgctgggcctgaagccgtgaagggccagacgctcctggcagtggccaagtcccagtgagaccaggggcttgggttgagggtggggggtctggtagaacactgcaacccgcttaacaaataatcctgcctttggccgggtgcgggggctcacgcctgtaatcccagcactttgggaggcccaggtgggcggatcacgaggtcaggagatcgagaccatcttggctaacatggtgaaaccctgtctctactaaaaatataaaaaattagccaggcgtggtggtgggcacctgtagtcccagcaactcgggaggctgaggcaggagaatggcgtgaacttgggaggcggagcttgcggtgagccaagatcgtgccactgcactctagcctgggcgacagagcaagactgtctcaaaaaaattaaaattaaaattaaaaacaaataatcctgccttttacaggtgaaactcggggctgtccatagcggctgggaccccgtttcatccatccatgcttcctagaacacacgatgggctttccttacccatgcccaaggtgtgccctccgtctggaatgccgttccctgtttcccagatctcttgaactctgggttctcccagccccttgtccttccttccagctgagccctggccacactggggctgcctttctctgactctgtcttccccaagtcagggggctctctgagtgcagggtctgatgctgagtcccacttagcttggggtcagaaccaaggggtttaataaataacccttgaaaactggatcggatgaattggctttcattgtgttcctagcatcttctcaaatcaacttcccaggactccagggtgaaggaggaaaagaggcatggcccaggccctggggtgtgggatatggtctccctaggggatgacagttgggatcaatggcctgtgacttctcctctcccttcccccatcctgggacctaactggaaataaaaccttgactgttgcccgggtgtcattttaccagtggatttctgccagggcttgtgtcctaggagaaggtttaagttaaaccagattgcccaggtctccaaacgatttgtcatgctgacctgagatcatcgaagggggcacctgcccccgggcaaggttgcaggggcaggatggggctgaagggatgagcagggtcccgggcccacctgctgatacagcattggccatgtgggggctgcaatcggatttggaagaccctggggcttgggggcatgtccagttttcccagctccctaaaaaatgaccatgcagcctggcgccgtggctcatgcctgtaatccaaacactttgggaggctgaggcaggcagatcaccggaggtcaggagttcgagaccagactggccaacatggcaaaaccctgtctctactaaaaatacaaaaattagccaggcacagtggcacgtgcctgtaataccagctacttgggagggtcaggcaggagaatcacttgaacctgggaggcggaggttgcagtgagccaagatcacgccactgcactccaggctgggcgacagagtgaaactgtgtctcaaaaataaaaataaaaataaaaagaccatgcctacatctgtggtcattccaggcaaggcaatgaaaaggcagggttctgaggtccagcagggctgggtttgaataggatccctggccgggcacggtggctcatgcctgtaatcctagtactttgggaggccaaggcaggcaaatcacgaggtcaggagtccaagaccagcctgacgaatatggtgacaccccgtctctactaaaaatacaaaaattagctaggtgtggtggcaggcgcctgtaatcccagctactccggaggccgaggcaggagaatcacttgaacccagggggcggaggttgcagtgtgtcaagatcgcgccactgcactccagcctgggcgacagagtcagactctgtctcaaaaaaaaaaaaagaaaaaaaaggaataggatccctcacttgctgtggtatgcggggcaagtgttttatgatctctgagcctcagcttgctcatctgtgaaatggggatcctagggaaagggaaggcctggcttctggcttagttaaggggcagattaagaaataaaaagaggctgggtgcaatggctcacacctgtaatcccagcaatttggaaggctgaggtggaaggatcacttggggctcaggggttgaagacaagcctggtcaacacagggacatctcgtctctacaaaaagtttaaaaagttagctgggggtggtggtgtgtgcctgtggtcccagctacttaggagactgaggcgggaggatcacctcagcctgggagggcaaggctgcagtgagctatgatcacaccactgcactctagccctgggcaaccgagcaagacccagtctcaaaaatcgataaataataataattaataagaaaagtcatcagcgagttggccaaggtcactcagcagggctatgggggctgtgatcgcatggactgtctctatggcaacagcagtgaggatgacaggtggccaaacttggtccgggaacgtataatagctcaatcttttgaatctagcgctcccgaattactatggcaaccgtagggcactgggccagctcaaggagagggcgagggaagcctggagccacgccccctgggcacgcccccgcacggcctctccccattggtcagttccggaggcccccactgcgcgagcagctataagaagggcgggcgggaccggcgggggtgtggagactcgagcctggggtcggcggagacagctggtgtctgaagccgctcgcgcccaggtgagtgccctgagggcggcgtccgggagcgcccccccgggcttaggagaggagctccagatagggtggttgggcgaaggtccggcggcgtgggacgggtatgaccggccagagcaggtggctgggacccttggcccggttggccccagctcaggacccagttgggcgaggaccaggcctcagaggacgcggggtggcaaccggagggatcgcaggcggcaggtctgaggcccgaggtcgagctccccccctgtaactctagctggctgcgtgaccttgggaccagcatggacctgctgcgtacctcagttgccctgtctgtcaaatgagctgtgagtggactgggacccagcagctaccacctccagccgtctagggtgcttgggcagttctgggcccaggcaggggccgcaggggtagcagggacctcccacatcttacaaaacaggaagcagcccagagaggtgaaggtgcttgccaaaaatcacacagctggccaggtgcagtgtctcatgcctgtaatcccagcactttgggaggccgaggtgggcagatcacttgagcccaggagtttgagaccagcctgggcaacatggcgaaacccggtttctactaaaaatacaaaaattagccgagcatggtggcacgtgggtaatcccagctaactgggaggctgaagcaggagaatcacttgaacctgggaggcggaaattgcagtgagctgggatggcgccactgctctccagcctgggcgagagagattctgtctttaaaaaaataataaaaataacaccgcaattaatggtagcatttgaacccaggtctttctcacctcagagaccatgcttcgagtcactccggcaaccctaccttgccagaggctcattattggacaccctctgtgtacagagctctggacatgcattgtctgagctccacagaatgccccattatgcagatgaagaaactgaggccccaagaggtttgagagttgctcaagtcacagagcccaatttgacaggatctgatgcctgggcaggtgctccccttactcaatcctgccccgcagggtgaccctgtttgcagcacgatgtctgaagaagaggcggctcagatccccagatccagtgtgtgggagcaggaccagcaggtgagggctgcccctcccatggagcagggacagaaggtattgtgtgggacagtcccttctaggagcgtttcaggccaggtatcccgccccactcctctccttgctgggaaaacctgagtcataaaatattttggtccatggaggggatggtctatttcctagtgggggcttaatgaggccctgggaggggagtgtctctcaaagacacccagctggcttctgtggcccctacccaaccctttccctctcctttgatccctgggtctccacctgtatccttctgtctccacgtccaccatcatggcgccctcagtaacaacaatagtaagagcagcaatcactgtatcagtcacagttccaaccgtttcatgtatattggctccttgaacacccatcacaaccctagtaacccatttcatagatggggaaacaaaggcaccgaacagttcagtggcttgcccaagttcacacaacttgcaggcagctgaaccagaagtgaacagaggccactgtgctccaggggcagtgctctgaacccccagactctaacatctcctccctcgagcagacagatcgcagtggacccttcaacaacatgggtttgaactgcacaggtcaggctgggtgcggtggctcagacgcctgtaatcccagcactttgggaggccaagcgggcagatcaactgaggtcaggagttcgagaccagcctggctaacttggtgaaaccctgtctctactaaaaatacaagaattagccgggtgtggtggcgggtgcctgtattcccagctactcgggagcctgaggcaggagaaccgcttgaaccctgaaggcgggggttgcagtgagccgagatcacgccactgcactccagcctaggtaacaagaacgagactccatctcaaaaaaaaaaaaaagccaggtggggtggtgcctgcctggaatcccagctaattgggaggctgaggcaggagaatctcttgaacccaggagacagaagtatgcagacctttttcaaccaaatgcagataaaaaaaatatagtatttggccaggtgcagtggctcatgcctataatcccagcatattaggagactgaagcgggaggatcgcttgagccaggagttcaagaccagcatgggcaacacagcaagacccaatctctataaaataaaataaaattagctgggcacagtggtgtgcacctgtaatcccaggtacttggaaactgaggttggaggattgcttgaggctaggaggcttaggctgcagtgagccgtgcttgaatcactgccctctagcctggccaacagagcaagaccttgtctctattgaaaacaaaaaaattgtgaccaggtgcaatggctcaggcctgtaatcctagcactttgggaggctgaggtgggtggatcacctgaggtgggtggatcacctgaggtcgggagttcgacaccagcctggtcaacatagtgaaaccctgtttctactaaaaataaaaataaaaacaaaattggctgggcgcggtggctcacgcctgtaatccctgcactttgggaggccaaggcaggtggatcacctgaggtcggtagtttgagaccagcctgaccaatgtggagaaaccccatctctactaaaaatacacaaacaaaacaaacaaaaaaaacgggtatggtggcgcatgcctgtaattccagctcctcgggaggctgaggcaggagaatcacttgaacccgggaggcggaggttgcgctgagccgagatcgtgccactgcactccagcctgggcgatagagcgagactccctcttataatataattgccaggtgtggtggcgggcacctgtaatcccagctacttgggaggctgaggcaggagaatcgtttgaatccaggaggaggttgccgtgagccgagatggtgccactgcactccagcctgggtgataagagtgaaaccccattacaaacaaaattgtaatgctctgtgtacgccatgggaagaggagcctgtgagtgcaggaaccatgacattctcacatccacgtttatcttcactgcctctacgtggcggggtgctcagtactccatccttccactctcccatccctcgtcctggcccagagaggggaagtaggttgaggtgtggctagggccccacttcccccagggtccccctgatgccgacccttcccgcagaacgtggtgcagcgtgtggtggctctgcccctggtcagggccacgtgcaccgcggtctgcgatgtttacagtgcagccaaggacaggcacccgctgctgggctccgcctgccgcctggctgagaactgcgtgtgcggcctgaccacccgtgccctggaccacgcccagccgctgctcgagcacctgcagccccagcgtgagtgccctggcccgtgtccctgggagctgtggcttgccacccccccaccgccccctgtcccatcctccttggtctatctgcatgacactcctgggggtcatcttcagcctagccacctgtcccactgccatgccacctgtcctcaatctcttcacttaagtccttctttaatctgatcaccagccaggcatggtggctcatgcctatgatcccagcactttgggaggccgaggaaggaggatcacttgaggccaggagttcaagaccagccagagcaacgtagcgagaccctgtatctcaaaaaaaaaattttttttttaaatctggctgggtgtggtggctcatgcctgtaatcccagcacttcgtgaggctgaggcggttggatcacaaggtcagaagtttaagaccagcctggacaacatagtgaaaccctgtctctactaaaaatacaaaacttggcccggtgtggtggcacataactgtaatcctagctactcaggaggctcatgcaggagaattgcttgaacccgggaggcagaagttgcagtcagccaagaccgcaccattgcgctccagcctgggcaacagagtgagactccatttcaaaaaaaaaaaagcaaaaacaaacaaaaaaaactgatcccctgataggtgcggtggctcatgcctgtaatcccagtattttaggagtccgaggcaggcagatcactcacttgaggtcaggagttcgagaacagcctggccaacatggtgaaaccccaactctactaaaaatacaaaaaattatccaggcgtggtggagggcgcctgtaatcccagctgcatgggaggctgaggcaggagaatcgcttgaacctgggaggcaggggatgcagcaagccgagatcgcaccactgcactccagcctgggtgacagagctagactctgtctcaaaataaataaataaatctgatcccctggccctctgcccttacctgtttactggtggggcccctcctctctgtccctatccatctgtctccctgtgtcccctcctttgttggcctgatgtgccttgggtccatttgtctctccaggccccctcccctctgcacctgcctctgcctgtcctaagccccgcagcctccgctctgtagttctcacatctctgtggacccctgagccgatgacaggcgggggactacaggatccttggcctctagtctgacccaggaagagggtcacctgagggtcctagcccagcacctcctcacctccctctcagccagcttctgtgaccttgagtctgtccgctgggccatctgagctgggcacggctgaaaagtcgccttggtgctgggagaacagggtgggtggcagggcccaggcaggatggcagaggaggcagtgcccaacccagcggcctacccacaccctcagggcccccagtctcacctagggaggcagccaggtccccctgtggtctaggccttctccccatctccctcgtagactctctctccaggcgccacaggtgtctgccccagcgtctttggtgtaagcggcttcttggtgtaaggtctcagaaagcctgtccatctcctggtgtgggtctcgtctccatcattccgttttgtttctccctgtcttatcctggtctccttccttctctgtctctgcttctctctctagcattccctccttctacaactctcactgcgtccctatctccctctgcgtctccccgagtctcactccccgcctctctcccttcagtggccactatgaacagcctcgcctgcaggggcctggacaagctggaagagaagcttccctttctccagcaaccttcggagacggtaccccggacgactagacatggggacctccagtgggggcaggccagattagaggcgggagggagggagggatggtgacaaccaggcttttagttaactcaagaaaaaacagccaggttaaaataactgcaacgtgtgtgtgtgtgtgtgtgtgtgtgtgtgtgtgtgtgtgtatacatatatgtatatacgtatagtgtatatatgtatatatacgtataagtatatatgtatatatacgtataagtatatatgtatatgtgtatatatacatgtatatatgtatatgtgtgtatatgtgtatatatgtatatgtatgtgtgtatacatatgtattgctagtaagggcagttaactccctcaacaccctctgtgagggaagggttttatcacccattttataggggaaactgaggcacggagccaggtagaagtccagggatctttgagtcccagccccagggaactagggtggcagaaatggagctggagtcccacggtgcctggagtgggggggcccttccttccaggtggtgacctcagccaaggacgtggtggccagcagtgtcacgggtgtggtggacctggcccggaggggccggcgctggagcgtggagctgaagcgctccgtgagccatgctgtggatgttgtactggaaaaatcagaggagctggtggatcacttcctgcccatgacggaggaagagctcggtgaggacgacaccctcaaccctaacccctgagtcctgccccgtccccatcccctgtggtacagatcagagaggtctgagactcacccaaggtcacacagcagatcagcaggaaacatacaactcaaaaccaggcctgtcctccctcccggtcacttccacggcccctcaacctgcatcccgccaggagtcagaacacccagaccctaagggcatatagggcttttagacttgaggtcccaaactggtggcccccaaatgcctgtgcagcgtgttttaaatattttcattctttgcatgcatttaacaaccagattttgcattacatgtcccgattcttggcttgttttgaaaaaccagacacactgccaggcacagtggctcacgcctgtaatctcagcactttgggaggccaaggtgggcagatcatgaggtcaggagttcgagcccagcctggccaacatagtgaaatcccgtctctactaaaaatacaaaaaattagccaggcgtggtggcgtgtgcctgtattcccagatactcgggaggctgaggcaggagaatcacttgaacctgggaggtggaggttgcaatgagctgagatcgcgctattgcactccagcccaggccacagtgcgagactccgtttcaaaaaaaaaaaaagaaaaactagacacagccagaatattgtctgctccttcagatggtttgctcagctccactagtccccagtggtttatgtcatatctactttgatggtttttggtacctgcctggccctggagaccatgtgaatgtccaactctggccttacagtactggaagaatgtatgggcttacccccacctcagcagaaaagcagggaggcggccgggcacggtggctcaggcctgtaatcccagcactttggggggccgaggcgggccgatcacgaggtcaggagatcgagaccatcctggctcacacggtgaaaccccgtctctactaaaaatacaaaaaattagccgggcgtggtggcgggcgcctgtagtcccagctactcaggaggctgaggcaggagaatggcgtgaacccggggggtggagcttgcagtgagcagagatcgcaccactgcacttgagcctgggtgacagagcgagactctatctcaaaaaaaaaaaaaggcagtgaggcattgatcaggcacttcttgtgtgccaggcactcctgaatttttttttctttttttttgagacagaatctctcactttgttgcccaggctggagtgcagtgttgcgatctcagctcactacagcctctgcctcccgtgttcaagcgattctccggcctcagcctcccaagtagctgggattacaggcacccaccactacacccggctaatttttgtgtatttagtagagatggggttttgcatgttggccaaactcctgacctcaggtgagccacctgccttgacttcccaaagtgctgggattacaagcgtgagtccaccacgcccaaccattgttgttttttttttttttttttttttttttttgaagtggagtctcactctgtcgcccaggctagagtgcagtgatatgatcttggctcactgcagcctccgcctcctgggttcaagtgattctcctgcctcatcctcctagacaaatggaactagaggtgcacaccaccacatctggctgatttaaaaatttttttttaggccgggcgcggtggcttacgcctgtaatcccagcactttgggaggccgaggagggcagatcacaaggtcaggagatcgagaccatcctgtgaatggtgaaaccccgtctctactaaaaatacaaaaaattggccgggcgtggtggcgggtgcctgtagtcccagctactcaggaggctgaggtgggagaatggcgtgaacctgggaggtgaagcttgcagtgagccgagattgcgccactgcactccagcctgggcaacagagcgagactccatctcaaaaaaaaaaattttttttcttagagatggggtcttgttctgtcacccaggctggtctccaactcctgggctcaagtgatccccctgccttggcctcccaaagtgctgggattacaggcgtgagccgctgtgcctggactatgatatattctttttatttttttccaccatatcttgtgtggattttctctttttttattatttttcattcatttttttaattttaatttttttttgagatggagtcttgctctgttgcccaggctagagggcagtggtgtgatcgtagctaaccatagccttcaattcctgagctcaattgatcctcctgcctcagcttctcaagcagctgggactataggcacacgccactgtgcccagccctggctaatttctgtatttcttttttagagacagggttttttgctgtattgcctaagctagtctcaaagtaatcctccctgggctcaagcaatcctcccatctcggcctcccaaagtgctgggattacaagtgcatgctgctgcacccaacctatatttttaaaaggctgcttaaaagaatggttaagcaggccaggcatgatggctcacacctgtaaacacagcacgttaggaggccaggcaggcggatcaattgagctcaggagttctagaccagcctggccaacatggtgaaaccccgtctctactaaaaatacaaaacttaatcgggtgtggtggtgcacgcctgtggtcccagctactcaagaggctgaggcaggagaatcgcttgatcctgggaggcagaggttgcagtgagctgggatagtgccactgcactccagcctaggggacagagcgagactccatctcaaagaaaaaaaaaatggttaagcagtttgggaccaacgtgcctgggttccaatctgggtctgcttcttggatcctgcaggatctcacctctcctttgcctcagttttcctcctgtgtaaaacagggcccaccatagtgcctacatcttagggtttggggaagaccaaatgggttgatgtcagtcaaggggaactgtgaatgtgggaacctgtggcttctgtacccagaggtgggtgagcagatgtggagggggtgggtggctgtgctgaccccatgctgtccccgtgctgtccccgtatcctgtccccgtgctgtccccgtatcctgtccccgtgctgtccccgtatcctgtccccgtgctgtccccgtatcctgtccccgtgctgtccccgtatcctgtcctccagcggcactggcggctgaggctgaaggccctgaagtgggttcggtggaggatcagaggagacagcagggctactttgtgcgcctcggctccctgtcagcacggatccgccacctggcctacgagcactctgtggggaaactgaggcagagcaaacaccgtgcccaggacaccctggcccagctgcaggagacgctggagctggtgagagcccgctgcccgcccctgctccgggatgcaggccaatcagtatggattgagcaccagctgaataccggatcccgtgctagcctaaagcaggaggcggagctgggtgcagctgtctccagctgcatgtgttcagggctgggggacccgggcctggaggagcccagggatgtcatggctctgcctggagagtcagggaggggttttgtggaagaggggaaggagaagctggaatttatagcaagttagggtaggtcagaagagagccttcctcctcatcagaatcctcccatcctcagctcttccctccccgcagcagccaccagagggcacctgtgagcccctgagtcaggtctgtcccttctttacccacagccctctatggctcccacctcccttggggtccaagcccaagtcttccccacggccctgcacaacctgcctcggtctcctaaatgcttactgaggccagatcagtggtcctggaccccaccccgacccccagctcccccagctcccccagctctgaagaccaccatttctgtccttgcagatagaccacatgcagtgtggggtgacccccaccgccccggcctgccctgggaaggtgcacgagctgtggggggaatggggccagcgccctccggagagccgccgccggagccaggtgagaccgcaggagtgccaggtgaggtggtgtctgccaccaggccgcggaggaagagggggagcgacggactgcgggtcagcccagtactgccggggacccaactcaagctatctcaaaccaagtgctgagctcagctagttgaggtgtctggggggggaaactgaggcaggtttaagtcccattgtgtgttttatttatgtatttattttgagatggagttttattattttattatttatttatttttgagatggagggaggtggggggaaaggggggtgttggcccaagcaagcagtagtccctggcttcccgccccttctcgctttccctccctccacattctctccctgaacctatagcctagaaaccatctctccactttccactttatttatatttatttatttgagaaggagtctgtctctgtcgcccaggctggagtgcagtggcgcgatctcagctcactgcaacctccgcctcccgggttcaagcgattctcctgtctcagcctcctaagtagctgggactacaggtgtccaccaccacgcccagctaatttttgtatttttggtagatacggggtttcgccatgttggccaggctagtcttgaactccgcacctcaggtgatccgcccgactcggcctcccaaagtgctgggattacaggcgtgagccaccgcgaccggccccattgtgtgtttatgaaggagactgagtcagggctgggtcacattctgtgtctacaggggacaggactatgaggtctatgagacaggttgacagctccactgtgggtccatcagagaaaccgaggcaggacagcagtcctcctgggcgtccataggggaaactgaggtccccgccccctgcaggcagagctggagacgctggtgctgtcccgcagcctgacccaggagctgcagggcacggtagaggctctggagtccagcgtgcggggcctgcccgccggcgcccaggagaaggtggctgaggtgcggcgcagtgtggatgccctgcagaccgccttcgctgatgcccgctgcttcagggacgtgccagcggccgcgctggccgagggccggggtcgcgtggcccacgcgcacgcctgcgtggacgagctgctggagctggtggtgcaggccgtgccgctgccctggctggtgggacccttcgcgcccatccttgtggagcgacccgagcccctgcccgacctggcggacctggtggacgaggtcatcgggggccctgacccccgctgggcgcacctggactggccggcccagcagagagcctgggaggcagagcacagggacgggagtgggaatggggatggggacaggatgggtgttgccggggacatctgcgagcaggaacccgagacccccagctgcccggtcaagcacaccctgatgcccgagctggacttctgacccatgggccagtggaggcggggaggaaaggccacctgcacaccccgatccctgctgccccctggtggccacacgtaagctcgaggccttggccttgacccttctttggaatcaggcccaactccggatctctgaccacctttttggtattggactctcccattttttccttgaacacatggacaaagaggcccgggggagcagggcctcgaaccctattcaggccaacttgagccacaagctgggttcttcacctatgtcctgctccctggctccatgaagcgaatccaaatctttccaagaggctgggcacagtggctcacgcctgtaatcccagcactttgggagtctgaggcaggtggatcatctgaagtcaggagttcgggatcatcctggccaacatgatgaaaccctgtctctacttagaaagaaagaaaaaaaaaaaaaaagccaggtgtggtggtgtgcacctgtagtcccagctagttgtgaggctgacgcagaagaattgcttaaacccgagaggcgcggagcttgcagtgagcagagatcgcgccactgcacaccagcctgggtgacagagcgagactccatctaacaaaaaataatagtaacagcctcccgaagaaatacacattttgcccaatgccttctgtttggggctttgaaaagtgagccctgactgggtgtggtggttgacacctgttatcacagcactttgggaggccaaggtgggaggactgcttgagcccaggagttggaggctgcagtgagccatgatcttgcccctgcgctctcgcctgggtgacagagcaagactctatctcaaaaatgtttttaaaaaatacttcctagggaaacacacattttgccctatttggaactttgaaaagtgagccctcctctgcccatgggccgtgctgctcagcctgccatactcgcttgctttgctgtttgggatttgcctccagaataaaggtcctttttgttgttgaaaggcccacgtgtgtgttccagccagggtgagtctcagtcccagggggctgggggccacggaggtgtgtcactgctgagacatggagaagggggtgtgtagagccagagttcaagatctagaagaatggtgcttctctgacctgcctgtcatcctgtctgggatccaccgttactgcccagcccatgtggggtaagcattaccacttaaaattagccgggcaccatggctcatatcggtaatcccagcactttgggaggctgaggtgggaggatttcatgagcccgggagttttgacaccagcctgggcaacataggagaccttgtctctacgaaaaattttaaaatgacacatggtacgagcctgtgccccagctactcgggaggctgaggcagcaggatcgcttgagcctaggaagttgaggttgcagtgagcttggatcagtaaccactccactccagcctgggcaacagagtgagaccctgtctctaaaaataaacaacagcattgcccctttggccgcatggaagctgttctcatcttggtacaggtgaatttcatggaattgcagggagcagaaaagatggggaaggagtcagatggggcagctctctctctacctcctggtcctgcaggagctggtcttgctgtggtctctccagctgcactggccaggatgggaagacagaggcagggcaagggccataggctggtctcgggggtttcctcctgtcctctgaccgcattcctggctgctcttccgactcccctggggctgggcggggtgttgggaaaccacagcttggtatggtgaggtcagggtggcccctgacttccctgggacatagtccagagggcagctctgggatctccgaccacttccaccagccaaatctacctccctgctcctgttctggaatctcccacaggtccccactgcccacagaccaaactcttcaccttccagcttcctcctccagcctgacctggatactttgctctcttaccattgaagtgggcacattcccacctccgggcctttgctgaggctgtgcggccaccttggaatactcttcccaccccccatccgtccctcggacacatctcatacatcctcaaggcccagcctcaatgcctcctcctccaggaaggcttccaggactccatcccagccggatacttccctcctccggtcctccacaggccaccttctcaaggtttcttgccctttccaccttgactttatagccacaggcagccttgctctctcttcccacatgaggctgggggctcctggcagggccaggcctgttgaggatgatcagaacagcacataggggtaggcattttggcagagggaacagcttagggaaaggcacagcagtagggaaatcagtttcactgcagcagaggtgaggaaaagagaatgggttgagctaagccctgggatttttcttttcttttcttttctttgggggggtggggaaggagtctcactctgtcacccaggctggagtgcagtggcgcgatcttggctcactgcaacctccacctcccaggttcaagtgattctcctgcctcagcctcccgagtagctgggattacaggcgtgcgccaccacacacagctgatttttgtatttttagtagagatagggttttgccatgttggccaggctggtctcgaaccctgacctcaggtgatccacctgcctcggcctcccaagatgctgggattacaggcatgagtcaccgcgcctggcccattaattcatttaatttttatttaaagatatattttgggcagccgggcacagtggctcatgcctgtaaccccagcgctttgggaggccgaggcaggtggatcacgaggtcaggagatcgagaccatcctgcctagcacagtgaaaccctgtctctactaaaaatacaaaaaattagctgggtgtggtggcgagtgcctgtagtcccagctactcgggaggctgaggcaggagaatggcatgaacccgggaggcagagcttgcagtgagccgagatcgcaccactgtactccagcctgggcgacagagcgcgaccccgcctcaacagaaatatatatatataaaatatattttttttatttatttttttttttttttcttttgttcttttgaggcggggtggcgctctgtcgcccaggctggtctcaaactcctgtgctcaagccaatcctcctgcctcggtctccctaaatgctggggttacagggtgagccatggcacctggcctgaggtatatattttttaaagggagaggagatccaggaatgcctctttgaggaagtgatatttgaggaaagacctggaaggaggtgagggatgtgggaaagggtgctggaggcaaaagcaacaacccacacgaaagccctgaggaagggtgtgcggggctaagcaggcacagtcacgtgtgtctttgagggactctgtcctggcatgttatgggaacagtgaaaaggcccgtgtggctggagcagagtgaagagaagaaggagaggaaggtggggagcagacgaggcaggttatgcagggcctaccgggctgcaggaaggggacttgggctttgaccctgggctcccaccccggagaaggtgggagccatggagggtgctgggcagaggaggggtagatcctggctgggatgtttatgatcactttttaattttttctctccacacactgggctgtggctgccctttgggaaggggaggggcacccagagctctcccagccacccttgggaagcactggctggtagaagaggttgggggacacccccccttctgttcccccactgtttggcaaacacagtgtcggctccaaggagacagacggcctgggaatcatcagatcctgtggctgtaccctccctcctcccagcccagtgcccagagccacccatggggtctgccctctcacccccaataacacagggctaggaaccctgtctcaggggcaggtaggagggggacacagcccagggtgggcgttacggccattcctctgcccacccacccacagacagcccagcacataggctgggctcagcacgaaggtcctgggtctgggtttgaatcccgtcctcaccacttcctggaacaggagggtctgggtttgaatcccatcctcaccacttctggaacaggacgcctcctccagggagcctccctgggttggcccaagccccccaggctgggtttccactcctagggtgcccccagcttggctggtgctccatcttggtctgcgttttggcccaagtcccttccggagagtgatgggctcccctccacactgaggacaccccctgctccttgccgagaccccgagaccccgcttctgcctgggtaacgcgaaggcagcatttgttcagtgcatgacctcatctcacagaggctcacaaccactctctgtgttgctccattgagccaaacgtgtattaagcgccaaatgtatgccaggcactgttctgtgggcggaagagggtgccctgtgggaacctgcagggaaggtgttccaggcagagggcacagcccgtgcagaggccctaaggcaggaccgtgccaggtgcgctggaggcatagcgaggaggcctgtgtggctgggatgaagcaagcgaaggaggaagctgggggagatgagagcagagaagaagctggatgttacgggacgtggtgcggagtacgagagagaaacctgaagcaaaaagatggtaactggccaaggcatcctggtgcagcagagatttgaactacacccacctcgtggatggaactggaggctcaggggcccgggaggggagcccatctggcctgtgagccactcagcctgatgcaagctgtgggcaggaaacaggggaaaggtgctgggcctgggcccatgctgggctgggcaggtagccatgtgaccgtccaggccacctcccccgggcccattggccgcctgccgctgctggctgggcctgcgcctgccccggaccctataaggccagggagctgagggtagagccagctgccagccgggccggtccgtcctccaggggaccccgcgcagtccaggtgagcggggccgcgtctgcttcggtgacaccagggtgaggccaggcctgcaggtgggtgtcgggctgctcaggctttcagtggggagtgggtgtgggatgggaggctagggaacccccattcacgcaccttctctgcccccttccagcttctcacgttctcactatgtctgctccagacgaagggagacgggatccccccaaaccgaagggcaaggtaaagaggggaaatggggcagattcttgctggggcctggagatgccccagagccggggaaggtgacctccacagtcctggggtctcgaatctggagaggtgcttccctggtgggctggtgggggcggtctgggagccatgatgccaatcccttcctttctgacccaagctggaggcgggggacccacgcagacctcgacaccttccccagcaagtgaccttgggccggcctcagctccgcccctctctgagcctcagtttccccatctgtgcagtggggatcctggaaggaaaaggtctttggagatcgggtagacgatcttttcctctgtgcatgggaggcaggctgagtctgcccattgcccaggtgtggaaattgaggctgagtggctgaaacactttcctgaggtcacccaggagcaaggggccggggcggcattgggctgatcaatcgatgcttcctctgacccgttcctgccgaggcttggcctgctcatcctgcacaccccccgcccccatgcagaccctgggcagcttctttgggtccctgcctggcttcagctctgcccggaacctggtggccaacgcacatagctcggcgagagcccggccggccgctgaccccacaggagcgcctgctgccgaggctgcccaaccacaggctcagggtgagtggctggcccagctgggggcgtggggggactctacacatggacctgggagaaggagctccccgggcagggacttccagccatttggggagtcctccatatttgtctgtgtgctctcatcagacactaggacatcttgtggtggatggggaaactgaggcataaatatggggggtgagtggccgaaggtggctttcaacccagcctgtctccctgcaatgcccccccactcagtccctcggccgttcccccaccctgcactccgtttctgatgcaccatggcccaggctgggtgctctgcccatctgagctcatcagagtgagatccagactcccagggaggagcaacagctcccctggggtcacacagcccaggggctccccagcctcctgtggctcagcttgggcgatcagggacggtgacagggaacccagggttggggcagccgcctgagctgggcctccctctgggcccagagccccaggcagctgacttctgctccacatgccttggcctggcaataggcagcaggcagctgcggtgggggcggggcgggctgggcaaggggctgttcccccatgccaggctatatgaaccccgggactcagggtgggtgtccacccagcagaggaagttccacagagccctacttcagggaacagcggccctgggcttggggggagcccccagcggggttggggggtgaccaggtctggctggtagccgtggatgtcacctcctgctgtccctggcggggtagctgaaacattcctgaccttttaggctgtgcctggctattgtgcaatgggcagccgggtagatggttctaactgcatccctcactctccctgaccggcccctgtccccacagtggctgcccacccagagcagacggccccatggacggagaaggagctgcaaccttcggaaaaggtgagaggatgtgcagggcagggtctgatgtggcaggagccctgggggtgccccctcctgcgacatttcagttcctgctatctggggggctgctccctcctgggacatttcagttcctgctatctggggggctgctgtgggcctgagggaaggcagacagcctggggatcccaggcggagcttcccctctgagcctctatttccacatctgtgaaatgggtgcagtgctaccccactctaatcacgtaaggttccagtctacacagggctgtgcctggcaagatgagaccaaagcgacagcagcgtaagcactttatttcttctacttttattttttgagatgcagttttgctgtttcacccaggctggagtgcagtggcacaatctcagttcactgcaacctctgcctcccaggttcaagcgattctcctgcctcaacctcctgagtagctgggactacaagtgctcaccgccatgcccagctaatttttgtatttttagtagatacggggtttcaccatgttggtttcaccaggctggtctccaactcctgacctcaagtgatccacccacctcagcctcccaaagtgctgggattacaggcattagccactgcgcctggcaagaggatctgttttaatcagcattttccagatgaggatattagctcagagagggcatgtggcttgcctaaggccacacagcgagtgtcgggagcaggagagggtaaaaagctgggacttgaacctgggtctctccaactacagggcccaaggtgcccacctgagccaaagctgggagatgtgttctgagaatacaatttccgggcttctcaacctcagtactgtggatatttggggttggatcattctctggggtggggccatcctgggcactgcagggtgccgagcagcatccctggtctccacctactccatgccaggagcctccccaagttgtgacaactacagatgtctccagacatcacccagtgccccctgggggcagaatcacccagttgaaaactactgaattaaaatagcaccttggccgggcacggtggttcacacctgtaatcccaacactttgggaggctgaggcaggcagatcagttgagctcaggagtttgagaccagcctggccaacatggtgaaacctcatctctactaaaaatacaaaaattagctgggcatggtggtgcacgcctgtaataccagctactcaggaggctgaggcagaaaaattactgaacccaggaggcggagactgcagtgagccgagatctcgccactgcactccagtctgggtgacagagtgagactctgtttcaaaaaacaaacaaacaaaaaaagtagcacctcacaggtacacccgagagttagaactcctaggccatcatcatcttcattcatttttgtgttttttaatttttttttatcttttgagacagtctcgctctgtcacccaggctggagggcaatggcacgatctcggctcactgcaatctctgcctcctgggttcaagcgattctcctgcctcagcctccagagtagctgggattacaggtgcctgccaccatgcctggctaatttttgtatttttagtagagacagggtttcgccatgttggtcaggctggtctcgaactcttgacctcaggtgatccacctgcctcggcctcccaaagtgctgggattacaggcgtgagccaccgtgcccggcctgtttttttttttaaagatggggtctcaccgttgcccaggctgctcttaaactcgtgggctcaagcaatcctcctgccttagccacccatagtgctgggattataggcatgagccactgtgcccagcctgaatatattattattattatcattatcattattatttgagacagagtttcgctctttcacccaggctggagtgcagtggcgcgatctcggctcactgcaagctccgccttcccgggttcatgccattctcctgcctcagcctcccgagtagctgggactacaggcgcccaccaccacacccggctaattttttgtatttttttagtagagacagggtttcactgtgttagccaggatggtctcgatctcctgacctcgtgatctgcccgcctcggcctcccaaagtgctgggattacaggcgtatatcattatttttgagacagaatctcatgttgttgcccaggctggagtacagtggtacgatcatatctcactattgcctcaacctcctgggctcaagcaatcctcccacctcagcctcccaaatagctgggactacaggtgtgccccccgcccagccagttgttaaaattttgtagagactgggtcttgtttggttgcccaggttgatcttaaactcctgggctcaagtgatcctcccaccttggcctcccaacatgctaggattgcaggcatcagccatcacacccagcctggatataatgattttaataagcaatttagtctccctggtgtccctgggacgccaggctcaacatttgccatgaatggagaataagcaagaggaacagaaatgtaactgtaggacctgcgttgagtccaggcctggggaccctggctgagtccaagcctaggacatgctgtcatggacgaggcctgcctgcagccgggaaagggggtgcgtgagaatggaagaggctggcgctgtgagctcatgaggacttcatcccggagagccagggtgccacaccacagcccgatgaatgtctggctgaccggggtcggggtgaggaggaagcagcttgctttttgaggaggtggggcctctgggtgcctgcagttccttgccccaaagcacactagggggctgggctggcagacatcggggtggagtacacctctcagtccttctcttgatccacctgtgtcctttctcagcagatggtgtccggggccaaagacctggtgtgttccaagatgtccagggccaaggatgccgtgtcctccggggtggccagcgtggtggacgtggctaagggagtggtccagggaggcctggacaccactcggtctgcacttacgggcaccaaggaggtggtgtccagcggggtcacaggggccatggacatggctaagggggccgtccaagggggtctggacacctcgaaggctgtcctcaccggcaccaaggacacggtgtccactgggctcacgggggcagtgaatgtggccaaagggaccgtacaggccggtgtggacaccaccaagactgtgctgaccggcaccaaagacacagtgactactggggtcatgggggcagtgaacttggccaaagggactgtccagactggcgtggaaacctccaaggctgtgctgaccggcaccaaagatgctgtgtccactgggctcacaggggcagtgaatgtggccagaggaagcattcagaccggtgtggacaccagtaagactgtcctaacaggtaccaaggacaccgtctgtagtggggtgactggtgccatgaatgtggccaaaggaaccatccagaccggcgtggacaccagtaagactgtcctaacaggtaccaaggacaccgtctgtagtggggtgactggtgccatgaatgtggccaaaggaaccatccagaccggcgtggacaccagtaagactgtcctaacaggtaccaaggacaccgtctgtagtggggtgactggtgccatgaatgtggccaaaggaaccatccagaccggcgtggacaccaccaagactgtcctaactggcaccaagaacactgtctgcagtggggtgaccggtgccgtgaacttggccaaagaggccatccaggggggcctggataccaccaagtctatggtcatgggtacgaaagacacgatgtccactgggctcacaggggcagcgaatgtggccaagggggccatgcaaactgggctgaacacaacccaaaatatcgcaacaggtacaaaggacaccgtctgcagtggggtgactggtgccatgaatttggccagaggaaccatccagacaggcgtggacaccaccaagatcgttctaactggtaccaaggacactgtctgcagtggggtcaccggtgctgcgaatgtggccaaaggggccgtccagggcggcctggacactacaaagtctgtcctgactggcactaaagatgctgtgtccactgggctcacaggggctgtgaacgtggccaaagggaccgtccagaccggcgtagacaccaccaagactgtcctaaccggcaccaaggacaccgtctgcagtggggtgaccagtgctgtgaacgtggccaaaggggccgtccaggggggcctggacaccaccaagtctgtggtcataggtacaaaagacacgatgtccactgggctcacgggggcagcgaatgtggccaagggggctgtccagacaggtgtagacacagccaagaccgtgctgaccggcaccaaggacacagtgactactgggctcgtgggggcagtgaatgtcgccaaagggaccgtccagacaggcatggacaccaccaaaactgtcctaaccggtaccaaggacaccatctacagtggggtcaccagtgccgtgaacgtggccaagggggctgtgcaaactgggctgaaaacgacccaaaatatcgcgacaggtacaaagaacacctttggcagtggggtgaccagtgctgtgaatgtggccaaaggggctgcccagacaggtgtagacacggccaagaccgtgctgaccggcaccaaggacacagtcactactgggctcatgggggcagtgaatgtcgccaaagggactgtccagaccagtgtggacaccaccaagactgtcctaactggtaccaaggacaccgtctgcagtggggtgaccggtgctgcgaatgtggccaaaggggccatccaagggggcctggacactacaaagtctgtcctgactggcactaaagatgctgtgtccactgggctcacaggggctgtgaagttggccaaagggactgtccagaccggcatggacaccaccaagactgtgttaactggtaccaaggatgctgtgtgcagtggggtgaccggtgctgcgaatgtggccaagggggccgtccagatgggtgtagacacggccaagaccgtgctgaccggtaccaaggacactgtctgcagtggggtcaccggtgctgcgaacgtggccaagggtgctgtgcaaactgggctgaaaacgacccaaaatatcgcaacaggtacaaagaacacccttggcagtggggtgaccggtgctgcgaaagtggccaaaggggccgtccaggggggcctggacactacaaagtctgtcctgactggcactaaagatgccgtgtccactgggctcacaggggctgtgaacttggccaaagggactgtccagaccggcgtggacaccagcaagactgtcctgaccggtaccaaggacaccgtctgcagtggagtcactggtgccgtaaatgtggccaaagggaccgtccagacaggtgtggacacagccaagacggtgctgagtggcgctaaggatgcagtgactactggagtcacgggggcagtgaatgtggccaaaggaaccgtgcagaccggcgtggacgcctccaaggctgtgcttatgggtaccaaggacactgtcttcagtggggttaccggtgccatgagcatggccaaaggggccgtccaggggggcctggacaccaccaagacagtgctgaccggaaccaaagacgcagtgtccgctgggctcatggggtcagggaacgtggcgacaggggccacccacactggcctcagcaccttccagaactggttacctagtacccccgccacctcctggggtggactcaccagttccaggaccacagacaatggtggggagcagactgccctgagcccccaagaggccccgttctctggcatctccacgcccccggatgtgctcagtgtaggcccggagcctgcctgggaagccgcagccactaccaagggccttgcgactgacgtggcgacgttcacccaaggggccgccccaggcagggaggacacggggcttttggccaccacacacggccccgaagaagccccacgcttggcaatgctgcagaatgagttggaggggctgggggacatcttccaccccatgaatgcggaggagcaaggtgaggggacgcctgggttcatgggtccctgaggcaggcacagctgctagcaggtccttgactgttttgtttttttttttgagacagagtcgtgctctgttgcccaggctggagtgcagtggcgtgatctcggttcactgcaagctccgcctcccgggttcacgccatcctcctgcctcagcctcccaaacagctgggactacaggcgcccaccaccacacccggctaattttttgtatttttagtagagacagggtttcaccgtgttagccaggatggtctcgatctcttgacctcgtgatccgcccgcctcagcttcccaagtgctgagattgcaggcgtgagccaccacgcccagctgggcccttgactttttttttaaaaatgtatttatttggtttgtttcagatgggggtctccctgtgttgcccaggctggtctcaagcttgtgggctcaaacgatcctcctgcctcagcctcccaaagtgttgggattacacgtgagagcacctggccctttttcatttttttagagacaaggtcttgctctgtcacccacactggagtgcagtggtgcgttcactacagcctcaatctctcgggctcaagtgatcctcctgctccagcctcaagtagctaggaccaccatgcccggctatgtatttttttgtatgttttttgtctctctatgttgcccaggctggtctcaaactcctgggttcaagtgatcctccagcctcagcctcccaaagtgctgggattacaggcatgagccaccatacccagcttcatttgacttttatttttacttatttatttttgaggcagagtctcactcttgtcgcccaggctggagtccagtggcagtgtcagcacactgcaacctccacacttcctgggttcaagcaattctcctgctcagcctcccgagtagctgcgattataggcgcccgccaccacacccggctaattattattattttatatttttagtagagataaggtttcaccatgttggccaggctggtctcgagctcctgatcccaggtgatccacccgccttggcctcccaatgtgctgtgattacgggcgtgagccaccgcgcctggcctcacttaactttttttttttttttgagacggagtctcgcactcttacccaggctggagtgcagtggctccatctcggctcactgcaagctccgcctcccgggttcacgccattctcctgcctcagcctcccgagtagctgggactacaggcacccgccaccacgcccggctaattttttgtatttttttagtagagacggggtttcaccgtgttagccaggatggtctcgatctcctgacctcgtgatctgcccgcctcggcctcccagagtgctgggatcacaggcgggaaccgccgcgcccggccctcacttgacttttataaagccctgatgccctgaggggcttccgggactgagcggtgcgccttcctttccagctcagctggctgcctcccagcctgggccaaaggtgctgtcggcggaacaggggagctacttcgttcgtttaggtgacctgggtcccagcttccgccagcgggcatttgaacacgcggtgagccacctgcagcacggccagttccaagccagggacactctggcccagctccaggactgcttcaggctggtaagagcttccccctgctgctgccccgtccccagggcacttcttagaacccctgcccaggactcacccagctgcagatactgactgagcacctaggagatgatgctgtcagcgtcaccaatggtcatggctctgtactcatggggcttgcctcctggcaagggggacggagctagatcagatccttaaagacagcgggtaggctgggtgcggtggctcacgcctgtaaccccagcaatttgggaggccgaggcgggtgggtcacttgaggtcaggagttcgagaccagcctgaccaacacagagaaaccccgtctctactaaaaatacaaaaattggctgggagtggtggcaggcgcctgtaatcccagctacttgggaggctgaggcaggagaatctgggaggcgaggttgaacccgggaggcggaggttgcagtgagccaagatggtgccactgcactccagcctgggcgacagagcaagactctgtctcaaaaaaataaagacggtggggacacaaagacagcaaaacaatctgtgtgcagagggggatgtgggctgggcaggaaggccgtccctctgggccctgtcctgaccgatggggagacagctctgcaaagcccccaaaagcagggacaggacagcaagctaccggggagcaagctgggtgtgttcggggaatggaaaggcggcgctgtggctgggtaaagtgaagccaggatgggatccagggagcccgcagggcctggggctgcaacgcacgcaggaaaggacccaacgcaacatgactcggatgcatccaggggtcatgcaccctggccagagtcgtccacccctcccactggccccgctctcttcctctggcctaggttctcccctttggcaatgtggacgttggggccggatcgtgctctggggtgggatcatcctggtccctgcagggagctgagcagcgtccctggcctccagtctccccgtccccagtcctgagggccaacatttcctctagaagctgttgtgcagcccgggaggcagaaatctcacaggactgctctaggggtttatgttttggagacagtgagacagggtcttgctctgccacccaggctggactacagtggcttgatcatggcccactgcagcttcaacctactggggtcaagagatcctcccacctcagcctcccaagcagctggacaactggcatgcaccaccacgcccagcttagtatttgttgttgtatttttagtagagattagattttgctatgttgcccaggctggtcttaaactcctgggttcaagtgatcctcctgcctcagcctctgggtgcacactaccaaacctggttaaattttttgtagagatggggcctccctatgtagcccaggctggtcttgagcttctgcgctcccgcgatcctcttgccttggcctcccaaagtgctgggatgacaggcgtgagccaccgtgcccagcagtcacaggttttacatgttggtggacagcagtcccaccccggcgggccgtgagaaaccttgagatgccgccctcggtcaggattcctggcgtgcagcctaggccactgtgttttccatcaacatccggggtttgtgacaagccgcagtttgagggtctaacccagggttctcagtgtggatgacctgcctccaggggacactagtccatgtctggggacatctgtggttgtcacaactgggggaagcccctggtggagagtagggacactgctcagcaccctgcagtgcccagggtggccccaccccagagaaccatctagcccccgtgtccacagtgccaagggcaagtctgtcctagggaccctcaggacacctcatgtcactgtggccacccccagatgcacagtcgctgccgtgcctctggcacgcggtacaatggcgcagttggaaggcgttcctgtaaacgccatggaggaatgaaggaatgggcccaccctcgcagcacgctgcaagcggctgatcacaaagcattttcccacctttgaatcctcacagcaaagtagcctgggccagaactcagcccaggcactcttcagaaggggagaaggaggccacaggaagagaagagctttgctcagggccacacgtgaaggatgctgggctgggaaatgggatgtggtgtgtgactcatcatgtctcacttgttcctttaagtgctactgaagaccctggatatccaggcctgcccttggggggtggggggcgccatggttggggaagacaattcacagatgaatatatagggcgtcgcgttggatgatgcttggaaaatggaacatgtaccaggataaggaagtggctgtgctggggctggtcaccctgaagaggggacacttgaagtcaggtctaaatgacagagagggagtgcgtcagaatgggcaggagtgtgatctgagcggagggcacggcccgtgcaaaggccctggggcaggactgtcccggcatgttggaggaataggaaggaggcctgggaggctggagccgagtgaggaggggatggggcaggttgggccggacctgggcttcgaccccaagggagttgggagccctggagggctctgggcagaggagcggcctgatccaaggtgggtttcatttaaaaggatcactctgatgggggaggtcaggccaccgggtgggggcgagggccagaggagacagtgggacgtaaacccaggcaagtgctgccgggcctcaggagtcacgctgtggtggtgagaagtagctgggctctgggtgtttcgaagtcagagctgcccgggtccgatgtgggaggtgagagaagaccccaagagacccctgaggcttgtaacctgagcagacaaggagagcaggggggctgaggggaggccgggcgggttgcagagtggatattaggagcctggccttggacagggtgaggggagatgcctggtgggcaccgaggggacgcgtctgcatatgcagctggcttcaggtctccagcactggcgcggcgagggctgggagggcgacagcagtctggagtcgatattttgacggcgtgccgcatccctaccagccattgagatgatgaggaagatggggccctgtggacagggtggggcgtgggtgccacgtgctggggacacagcaacaacgaggacagagtcctgagtgttcccctgccaggggcggataaacaccaagtcaatgaacaccaaagccgcacgctgtgctcccgaggagaggggcagatgtgacgggagggactggggctgccacaccatgggccaggaaggtctcaccaagggtcacctggagctgaggccgaacgcggaccttgtgaagggcccgggaagcaggctcccggctgagtgggcagtgtgtgcaaaggccctggggcagaagcctgctggagtggccggagggcagaatggagccagtgtggcctcagtggagacagcagtggggtgccatgggagatgaggccagaggtgtcccaggggccagcccaccaaggccatggtgaggagctgggttttatcttaagggtactgggcagccacaggtttaggggtgaggagtgacacgaccccacagacactgtgttacgtgcactccctgatgacctcatggggaagtttgaactattgcctctttctgcaagacaacacgcccactgtggtacaactgacttggaactcgtggcctttctcccaggactgtgaatgtgcccaggtccctgggggagggggaggtgggggttgtgaaaggtcatttgccaagaagccatcatttccccactgtactctctctccagattgaaaaggcccagcaggctccagaagggcagccacgtctggaccagggctcaggtgccagtgcggaggacgctgctgtccaggaggtgggtctggcacagggctagggtccccccaccccgcccatgggtctccactcaccttgcgccttcctcccacaggagcgggatgccggggttctgtccagggtctgcggccttctccggcagctgcacacggcctacagtggcctggtctccagcctccagggcctgcccgccgagctccagcagccagtggggcgggcgcggcacagcctctgtgagctctatggcatcgtggcctcagctggctctgtagaggagctgcccgcagagcggctggtgcagagccgcgagggtgtgcaccaggcttggcaggggttagagcagctgctggagggcctacagcacaatcccccgctcagctggctggtagggcccttcgccttgcccgctggcgggcagtagctgtaggagcctgcaggcccggcgcggggtcgccctgctctgtccagggaggagctgcctcagaactttctccccgcccccaaacctggatcggttccctaaagccctagacctttggggctgcagctggctgagcgccgaggggctgcggaggcagtgaccttcttaactgagccaccccacgccctgctccgggcctgcctgcatctcccacctcctccccagcgctgcctgcccctctcggagcctggggtcactcagaccaccagccaagagccttcccttgaagtccccaagcaagcactgcaattaggaaagagaaaaagcagcgtgcccagcctggaagggcatctgtttgccccgctagcaacccttttatatctagcagggctcttccagtcctgcagcacgggcccccagctatcagcggtgcaggcagtgctgtggcatcccaggctccgggcagctccgttctcatgctgaaagtgggtctccggccttagcacacacaccttgagggtcttaagaaccacattccctcatagtagaaagtactagaaaaagcgacactgccatcatcatcccaaggcaggctgctactgcctttgctgacccccggggtggcctcacggtggggacaaagctgccaggagccacagcagccacagctggggctttgcaccagcctggcttgagactgagcagtttgcagggggtggggggtgcaaaaaacaagcaaacaggctgctgctgcctccagctgcccaccacaggcctgccccaggcacctggggctctgaggcccctggggaggctgggcccagcagctgcccctggagaacacagacaaaggacttccccgcagggaactgtgccctatggagggatcagacagggctgggaacagccacagaggctgcgtgcctatggcacagcccttcctccgccgcacactccccctgggtcctcaggcccacccaagcgccgggctgcagaggaagcggggctggggaggctgcaggcatcagagacactggtggtggcggacccggccgccgggccccgtgctctcaggctagcccaggtcgtggaggctggcaggctcaggtcgggtgtgagacgtgccgtggctgcgctcagtccagcggggaggagccgttcagcccggcctccccaggaagccatatccccactcacccggtaagagaaccttgtcgtcccctttccatgctctcctaggacacgagcccaggaaccccagacccagggggaggaagggtggaggggccccaggggtcaccgtgtgcaccaggggccgtgaggggccggggcattcagctcagctctgaaccggggaagctggcacggcaaggactgcctcaggtgacgggccgtgagaggggacgggtcaggagccttcccaagccttctcctcagcccgacacccatggccatcggaggctaggatgccagacacagccatttgcagaaatcaggcacagtgactgcagctcacgtccagccaaccaagcatggggccgcagctcaggaagtcccttcccgccacaccacagcctaattcttactgggacggaggcaactcggctacgctgggcaggacgacaaacacgagacgccactgtggaatgagcaacttcggagcacggggtgacttgcttgggaccgtgcccacgtgacagccccttatgcagaggaggaaagagaagccccgagtgggaggggaacctgtccaaagtcacacggtgtgtgggtgacacagctggggtgagtcgaggctggcccctgaggcccatgctccctgaacgctggagaccactgtcggctagcagcggctctcagggaaggcctggtctccaccctcccagcctagcctcgcggaccctcgtcctccccacatcggacctgctcacctgcctggaccctgggctgccagatgcaggaagcatcaaaccccccagcctcgtgggtgcggggcagggcgcaggcagcacagcttagatgccctggtttgtccctcttgtctcctgggaagagcttgctcccgcccagctctcctgccactggcctttcagggttgggctgggcccagagtgccttttagtcgcttctcacggtggcctgatggctcaacccagtcccaaacgggcccagtgacactgccgcctgcgccccagctcaggcccccactgcaccagcaatgctagaaaaccaagccaataaaagtgatttcttttttcattaaaaaaccatttatagtcatttcatgttggttggaaatcacagaaattaggcaggaaaaaaaaacccaagggaacaaatacaaacagcacagcgttccccacagttctctgctctgctctcctgcgagccggggaaggagaggggcagcctgagctcgggcgggggctgggcctggctgcccgcggctcagctctcctcgtccagggcctccgagtccccccgtgccctctcgcgctcctgccggtcgctcccaggcctgtccaggtcgggaccctcccgtacgctgctggtgggaacagcaaaggcggtgtgaggatgccctcccgcccctgccctgcctgtagggcggttgggtgggatgggcaccgaggagtgtacccccgttgtggcacctgaggctcgagtgccgccctcctatctgcctgtcttctgccactagagaccacaaccatctccagggtccccacgctggcgccagccaggcatagcacaaggcagctgctgggtaagtgagtgactccactgagccttgtaccagacagcagcccacagtgatgggcacaggcaccgtcagatagccgggtgcccgtgctcggggcctacctacctgggccaccctggaggctcggcaagaagccaccttcccaggaggccaggggcaggcagctcaaagccctggagctgcctctctgtaggggccgccggaagtgccagccagcggggccctggggtcagctgtgaaggtgggaggcccgagtaaggacgacatccctgggacccatcccagagggactggcacaggaggagcggctcggacccagggtgcgcgtcacaccgctgccgctcaggagtccaaaccccacggcccgggacactcactcgtgcaggtcttcagaggagccacaccttggcccctcctccgagtcccgaccctcctcgtgctccttgtcctctgcgctctcccccttctgtgatgtggcctcgccattcactggggctgagagatctgggtgggacagaggggtcacaggacactgctgggctccagctgggcaccccagaacccttgcctgtcaaggactggaccaggggccaagctgagcgccgtgggtgacacatgcccatccacctggaccccagcacctgctgtccagtctgcaagctcctgacatgggatgctgcagccagccccagcccgagccacactggcctgcagaactgggggcccaagaaatgagggaacgtgggcagccctgagaaaagcccacagcagcctgggaaagacaaaggaagacaaggtcgggcacgggggctcacaatcccagcacgtgggaggccgagacgtgaggctcacttgagcccaggagttcaagaccagcctgagtaacatgccagcaaccctgtctctacaaaaaatacaaaaattagcacgtcctggcagggcgcagtggctcacgcctgtaatcccagcactttgggaggccgaggagggcggatcatgaggtccagagattgacaccatcctggataacacggtgaaaccccatctctactaaaaaatacaaaatattagcctggtgtggtgttgggtgcctgtagtcccagctcctcgggaggctgaggcaggagaatggcgtgaacccaggaggcggagcttgcagtgagccaagatcacgctactgcactccagcctgggggacagagcaagactccgtctcaaaaaaaaaaaaaaaaaaaaaaaaaattagcagggcatagtggtgtaggcctacaatcccagctcctcaggaggctgaggtggaggatggcttgcgcccaggaagtcaaggttgcagtgagctgtgattgtaccactgcactccagcctgggggacagagcgagaccccatctcagaaaaaaaagaaaaaagaaaaaaaagacactagccttcggctgccccctgggccgcaaagccccatcccaagctcgcccatcccatctccaaagggctgctctgagcacctgtaatggggccatgtcagcccagtagccccacagccagcagccccgagggtcacacctcatctcctgtcggcccaccaggcaagcaagggcacctgaggcctccgcccccgagcctccaccgactgcctctctgaacaatgcccccactctttgcccccgctgcacagagccacccccctctctgggcgtcccagggtgggagacggtggaggcgtgtgctgtcatgcactgtccccgtcacccctctggcgtgagccccaagttacctgcatgctggctgcctggcacacggtaggacctgaatgcccctcactggctgccccagggattaaagccgggtctgcacggagaccccaacaggacatgacactctggcaggtttggggcagagagtagagctgtactccccttctggaatgttctgcaaagcatctgtttcttcagctgaggagactgaggtacagggcccaccccacccgcccctcaccggtgctgggcttgtcctccgccttctcctggggggcctcctccccggccagctcctccccggccagctcctccccggccagcttctcctcggccttctccttctccatcccagccttgttcactttctgcaccgcctcgatctttgggccgaggacccgcgacttgagccgggtatagacttctgctgccttctccattacgtccttgttcgctttgtaacggcgaatctggccaccaagagaagaggcctggctcacccaagtgcagcggccctagccccggctctgaacccctcgccccagcaatgcgcccctcccgcagcccctcccgggagcacagctctgtgcagcaggcatttctttttttttttttgagacagagtctcgccctgtcacccaggctagagtgcagtggcgcgatctcggctcactgcaacctccgcctcccagcttcaagcgattctcctgcctcagcctcctgagtagctgggattacaggcgtgcgccaccacacctggctaatttttgtatctttagtagagatggggtttcaccatgttggtcaggatggtcttgatctcctgacctcgtgatccgcctgcctcagcctcccaaagtgctgggattacaggcgtgagccaccactcctggcaagcaccaggcatttctacccagcagcccacggcctcctcgctgacccagggctgtcccgacaggaacctgctgggggcctgggctcccgggcaggcacttgctcccagctcccccgactgcaccctgcgcctctgattcccccgccataccttcttcaaggtggccaccacgtctgtgttcttctggaggatctgagaggtcacctgcagggttcccagctcctctagggcattcaggcacctcttcacgtcctgcagggtggggtgggagtgagggagacggcctggccaagggatccccaggggtcccagggccccgatgggtggaggaagacatcctgggctctccttgaggggagctgtatctgcagaacagctcccctcagcccccgtccagttgacggggaactccagggatagccagatacttggggtcccaggtacgtgggggttggtcctgggggcctccacacaccacctgccgggaaagctgggtgctgcatgtcaggaccagctcccccagggcccttggccaggagaccccatgcgctcactagcaaccggaacagactcctggcccacccaactgcaggaccccggctttgcctcagtttcccgagacatctaagggagcctggcagggaggtggcagcggggactgcttggctcacaggccctgagggtcttaccgggctgtcgacctttagggcaaacttgatctcactgtgcagcttctgcagcttctcctccacggagggctctgggccaggagagagagcaccgtgtgggcccaggcagggccacagggggccagctgttcaagggcaggagcctgagagcctctggaggatttgtcatgggggccccaggtctgcaggctcagcccccacccctggaggcaccgccggccaggccggccgaggatgtgctgagcaccctctctagggacaggcgggacaggccagccacgccacggctgtccccgttcccctcagtgaactcagtgtgggcagtgctgggcagccaggcctcacctttcttcttctctaccttcctgtccatcgagaagccctcggaccgcttccgggtccgctccaccttcacgggcctgtggagaagtgctcccctcagtcgggccccgtcaccggcactctgccactgaggggctggcgcctgaaggggtggacccaaacccactgcaaaggaaacctttgggaggccctgggagctaagccgggaaacgggaggcggggaggccctgccacagcctaggcctagggcagaccagggcagccacaggctcgagctgcccaaagatacaagccttttcccgagttctcatgaaatcccaggattcttttcctcgttcacatggccaagggctggctttgtctaccagagtcagcgagctaggaaaaggccctcaagggtgacacgcgtgcaggagagaggcccattgctgaggctcggtgccatgtgctgctctgtaccccgccactgccataccggcctgccgaattctcatgggcaggtttgcccactcaaggccatttagaaagtgggctgggggaccaagcacggtggctcacgcctgtaatcccagcactttgggaggccgaggcggggggatcatgagtttaggagatagagaccatcctggccaacacggtgaagccccgtctctactaaaaatacaaaaaattagccgggtgtggtggcacacacctgtagtcccagctactttggaggctgagctaggaaaatcgcttgaacccaggaggcagaggttgcagtgagctgagatggcgccactgcactccagcctgggccacagagcaagcccaagactctgtctcaaaaaaaaacaaaaacaaaaacaaaaacgtgggctgcagccaggcacggtggctcacacttgtaatcccagcactttgggaggctgaggcgggcagatcacggggtcaggagatcgagaccagcctggccaacatgatgaaaccccgtgtctactaaagcaacaaaaattagccaggcgtggtggcgggtgcctgtaatcccagctactcgggagggctgaggcaggagaatcgcttgaacccgggaggcggaggttgcagtgagctgagatcacgccattgcactccagcctgtgcaaaagagcaagaacaagactccatctcaaaaaaaaaaaaaaaagtgagctgggagacaggctctgtctgcccaccacagggggaccaagatgcaaacccctaggccggggtgcagtttctccctcctcctctgcttgtggacattggggatggactgttctctgggatgggtcatcctgggcactacagggccctcagcagcgtccccagcctccacccgctccatgccaggagcaccccccagtcatgacaaccacagatgtccccggacgtggccgtgtctctggaggcgggatcgccctggaggagacccctgggctgggcaaagatcccactcccgcagcagcgattcctacgcagcccacacaacccaaggaccaggaacttcaaccgggtccggctccaaggctgaactcagaggtggggctgcccctgtgaggggtgagggttgtggggtgatgcggggtgcggggcccccagggtgtggaggggcagagcagggctcacttggcttgttgcttctcctcgggccgcactctcttctccttctggccaggtttcctggcgggctctgtgcttgaggactgcggcttcttcgctgatttcttggcctatagcagtcaggaagggcgcgctggagcagtgggaagaggggattacccagacccctagcccatcccactaccaggagatgcagctcgaccctttctgtcgccctccacactgtttgaaggtgctggggcaggatgggagaggagggaggacccagtgtccggtcctgagtggatcgtggggttcttggagcccaggccccattcagtggaggaacagcccccttcactcctcctgcccagcagtcctgggctgtggctgaaacgcctcctgcaccaggagttcggtgccctttctgtgatgaagggagtgacagagagagaacacggcgctgttcgtgctttccccaaagaaggcaggcctggctgaggggcaccagcacgtgggccccaggcactcagtctaggtgagactctggattcaggccacattgcctgaatctccacaagggtagagggcgtgacagggcccgcagcaccacacgtggtataggagagtcctgacagtcaccaccctaggaggcctcctacctgctcccacgctcacctgcaagctgtaccccatggcagccagagggcacccgagagcacccgagtgagggcctgtccctaccctgtccagtgccctccatggctcccacctccctcagggtcaaagcccaaatcctccctgcagcccacatggccctacccggcctgctctgtccgttccccaccgccctccttttccctctctcccctcctccctccactccagccccagaggccacctcgctgttcctccagcacgccaggcgcagtcctctgggcctgtgtgtgagctgcttctcctgcctagaatgtatcccctcccaggagtcttcgtagatcccctcccttcattcggagcctattttttttttttttttttttttttgagatggagtctcgctctggcccaggctggagtgcagtggcacaatcttggctcgctgcaacctctgcctcccaggttcacaccattctcctgcctcagcctcctgagtagctgggactacaggcacctgccacaacgcctggctaatttttttgtatttttagtagagacagggtttcaccgtgttagccaggctggtcttgatctcctcacctcgtgatccacccgccttggcctcccagagtgctgggattacaggcgtgagccactgcgcccagcccattcggagccttttacttaaacccaaacgcaagcctttggagtctactcacaccttcagggtctactctatttaaaagagaaaccccccaccccactttactcttctccttagcaccgaaaactccggacagcacgcactaccctcatgtcatctgtacagctcctccctcctttgttttgttttgagacagggtcttgctgtgtggcccaggctggagtgcagtggattgatgacagctcactgcagcctccaactcctgggctcaagcaatcctcctgcctcagcctcctgagcagccgggactatacaggcgcacaccaccacgcccagctaattttttaaggtttttatagagacagggtctctctatcttgcccaggctggtctcgagctggactcaagtaatcgtcccacttcagctgcccaaagtgctgggataacaggcgtgagccaccaagcccggccccctccctcccatgaatgtcccctcctccagggcaggagtttctgggcccacgcactgctttcttgatgggtcccggaacctgggatactgcctcctacctagtagatgctccataaacgtgtggagtgaaggcagggactcccggcgccctcccggctcacctctctctccagctcggcctcgggctcggagtcagaggaggacgggggaccccggccccggcccttgcgtccccgcttcttgacgggctcatcgtcctccctgagctcgtccccgctgctgccgccgctgccccgctcagcctccccgcggtcggcccgctcgcgcctccgctccttctcctccttctcctgctcccgcaggcgccgcagctcctcctcctgctctcgccgccgccgggcctccagctcgcgcctccgcgcctcgtcccgccgcttccactcactgatgcggtccacctcgtcgctgtcactggaggcggagggggcggttggggacctccgttcctccctcaggagcccgccctgcccctcagccgatggaggagccgccagaggggaccccagccccagcacccacctgtcactgctggagctggacggaggccgttcaggcttcggtttccgccctcgcggcttcgggagaggcttctccgctacaggaagaggaggagggggtgaccttcccttccagggctccaaggtgaccaggggactgcctgggagcgccccggcaggggccaggccaagagatgtgcgagcacgagggccctacctggcttcctgcccctcggaggcttcttcacagacacatcggagtcggaggaggaggaggaagaggaggaggaggacgccgaccgcgccatggccaccggctcaggcttggccccgtccgaatcggccttggagtcggagtcggaggctgatggcgccttctggggagaagcagggacaggcgtgagcatcaggagccccaccgtgagaagcggggcgcaccaggccagaggaggctcccgcacccctgcagccgccaggctctgcgggcctcggctcagggcccggctccgaatcccctcccacccacaaaacccacctccaccccaagtgaaaaccgggatcccaggcggccctgggcacgccgggcagctgctggcccttcccctcatcttcctcagtgaaccgggtacatcagaagcccgggtttcccagtggggacatctttttctttatgcaaaatcttgtgcggaggccacatcagacaagctgccgtgctctaccgcctccacccgagtaccctgccaaacacacacgccacacacagacaccacacacacaccacacacacaccacacacagacaacacacacaccacacacacacacagacaacacacataccacacagataccacacaccacaccacacacaccgcacagacacagacaacacacacaccacgcacacaccacacacagacaacacacaccacacagacacagataacacacacaccacacacagacaacacacacaccacacaccacacagataacacacacacaccacacacagacaacacacacaccacacagataccacacaccacacacagataacacacacgcaccacacacaaccacacacacactacacacagacaccacacaccacagacaactcacacgcaccacacacacacaccacacacacagatacacaccacacagacaccacacacacaccacagataacacacaccacaccacacacaccacacacacacagacaacacacacaccacacagataacacacacagaccacacataacacacagaccagaaacacacaccagacacaccatagacacagacacaccagacacacaaacacccaacacacatacaccacacacaccacacaccacacacagacaacacataccacacaccacagacaacacacataccagacacacacaccacacagacaacacacacaaacaaaacacacaccatacacagataacacacagacaacacacataccacaaaccatacacatggacacaccagacacacaaacacacacaacacagacaccacacacagacacacaaacacagacacatagatacatgaacagtatgcacacatggacacacaggcacacacacaggcaccacatatactcacataggaacacagaggcacaacacatagacgcagaggagaggtacagcacacacacacacaggcatacaggcacagggacacaggcaccagaaacacacacacaggcacgacatgtgcacacacgacacacacatcacacatgcacaatctacacacacactgcacacatacacacctacatggtcacaaacatgcatacacacaagtacacacacacacatgcacgtcgacacacgtgcacagagacagaacacacacacacaatccgctcatatacacactggcacacacctctctcctctcttctgtgtccctctcgcgctcttgctttctcactctctcactctcatgcaggcgcgtcaggactgcttccctcccttctgatgccagcatcccagaatgcccctttccaaaccagatggtgggctcctggaggcagtgcggccataacgaggtgccacgctcagggcagaggcggtcccctcgggtaccctgcagtccgtgtcccaccccctccagaaatggcccgccctgccctggggacagcactggagaccgcagaggtgccccacgagtgggcatgggaaacaaagtcaagtgcacgctaccttttttttccgtccccccagagggcccctccgtggcgcccggaccgctgctttcttctcaggtgtgaagtcctgggggagagaagtgagctgaactggggcccactggcagccaccacgcttccctgccatcccaaggagccactggcccacctggtcgctggtcttctccgactcagatgagctttccgagttctcctcttcggatggggacacgctggcctgatccaggtcgctggaggcctttcgggctcgtttcgagaccgacatctggaaggggaacggcctgaatgctcagtgatgggaaggccgggctcctggcaggaagcccccagctgactgcccaccacccacgacagctgagctctggaacctctctggcgggccaggaaccctctgagaacctgatcaaaccagggatcttgaaccttgaggacattatgcttggtgaaagaagccagtcacaaaaagacaaactcttataggaggtccctagggccatcagactcacagagacagaaagtaggatgaggggcaccagggctgcgccggggggggtgggggggtgggggggtgggggggtgggtggtgggagtgagtgtttcatgggacagcatttcagcttgggaagacgagaaagttctggagatgatggtggtgatggttgcacaaccacgtgaatgtgcttaatgctgctgaacggggcacttaaaaatggctaattttggccaggcacggtggctcacacctgtaatcccagcactttgggaggctgaggcgagcagatcacctgaggtcgggagtttgagaccagcctgaccaacatggagaaaccccatctctactgaaaaacaaaattagctgggtgtggtggcgtatgcctgtaatcccacctacacaggaggccgaggcaggataatcgcttgaacctgggaggcagaggttgcggtgagccgagattgcgccatcacactccagcctgggtgacaagagtgaaactccatcccccacccgccaaaaaaaaaaaagagaaaaaaaagaaataatccttccttggctcagaaacccctcatatactacaggtattttttccaaattctctctgttctttgcattttccaagttatctactataaatatggcttatcattttagaatcagaaaataatacaaagtacacgtgactctatcaaaagaatttgctgctagaatctggtcctttgtttctacacccaaatagtgagaaatggtcaaaaggcaggacagagaatatacccaggagaatggaacacacacatctgcacaaaactctgtacagaaacgttcacggcagcctgatctggaatggcccaaaagtggaaacaacccaaatggccagcgacatgtggatcaacacaccgtgttccctccacacaccggaatctgacccggccaggaaaaggaagggaggcagccaggcgcggtggctcacgcctgtcatcccagcactctgggaggccgaggcaggctgatcaggaggtcaggagttcgagaccagcctggccaacatggagaaaccccgtctctaccaaaaacacaaaattagccggacgtggtagcgggcccctgtaatcccagttactcaggaggctgaggcaaaagaattgcttgaacccgggaggtggaggatgcagtgagcagagatcatgccattgcactccagcctgggcgacagaactagagtccgtctcaaaataaataaataaatgaaacgaatggagctgacccgggctgcagtgcggatgcaccctgaggacgtcacgcttggtgaaggaaggcggacacaaaggctatgcagtgtgtgaccccatttctatgaaatgcccaggacaggcccctccacagaggcaggaaggggatgtgtgggtgccaggggccagaggaggggatgcggaggatcagctgatggggaccaggtttctttttggggtgacggaaatctcctggaataatggtaatggttgcacaattccgtgaacacactaaaaaccactgaggtgtatattcaggaaggatgaatctcatggtgtatggactataactcaattttttttaaatgcatactgaaaaacaattatattaaagaaagggaccaggccaggcaccatggctaacgcctgtaatcccagcactttgggaggccgaagcgggcggatcatgaggtcaggagatcaagaccagcctggccaacatggtgaaaccctgtctctactaaaatacgaaaaattagccgggcgtggtggtggatgcctgtaatctcagctacttcggaggctgaagcaggggaatcacttgaacccaggaggtggagattgcagtgagctgagatcgtgccaccgcactccagcctggcaacagaatgagactccgtctcaaaaaaaaaaaaatatggtggtggtgcccataatcccagctactggggaggctcaggcaggataattgctggaacccagtggcagagggtgcagtgagccaagatcgtgccactgcactcccgcctgggtgacagagggaactccatctcaaaaaaaaaaaaagaaaggtggccaggcgcagtggctcaagactgtaatcccagcactttgagagaccgaggcaggcagatcacctgaggtcaggagttcaagaccaacttggggacctggtgaatccccgtctctaacaaaaatacaaaaattagccaagtgcggtggcaggtgcctgtaatcccagctactagggaggctgaggcagaagaattgcttgaacctgggaggcggaggttgcagcgagtcgagatcacgccactgcactccagcctgggcgacagagtaagaccttgtctcaaaaaaaaaaaaaaaaaaagggcaggagagcaagctgccaggcgagacatcagggcaaggggatgaagggccagcccaccttggtcctcccctacctttagcgcaggcgtcttcctcttcaggccactgttgtcgctactcttgtctgagtctgagtcgctctccatcctgtcgctggcagctgtggcggttaccgctgtgacggccatgaccccccggtcctcatcgtcctcgtcagcgtcactgccgtcggcggggttggcctcgggggcctcgctgtcggaggagctcactggctgtgggagtcggggcagagaacgcgcgtcaccaccagtcgtgggtggatttccccatcaggactatgacccagaggacggcaaccacatgcgggatcctgaatgtcaggcgtgttgtctcctggctttacaaatggggaaaccgaggcccagaagagccgaagaacgaaggcaggagagtgagatggattcgtgtatggtgggcactagggtcgggccgcgggcttcagggttaaacctggggcaaatgacttcaaccctctgtgcttcagtgaccacttctgggcaatggggatggctcagttttgacctcagaggcctgtgaccaggaaagcatggaagtgggaggtggagcacctaagacagtgccgagaccatgtcaagaggtccagaaatggctgccctggccgggcgcggaggctcacgcctataatcccagcactttgggaggctgcagcaggcagatcacctgaggtcaggtgttcgagaccaacctggccaacatggcaaaaccctgtctctactaaaaatacaaaaattagatgggtgtggtggtgggcgcctgtaatcccagctactcaggaggccgaggcaggagaatcacttgaacccacgaggtggaggttgcagtgagccgagatcacgccactgcactccagcctgggcaacagagtgagactctgtctcaaaaaaataaaaaaagaaaagaaatggttccttttttttttttttaagtcattcaattatcaggaggaagaagccaagctaggacaagacctctgggcttctaccatccaggcactgctatttctcctacactcaaaatgcccgctcaggcagtgacagccacagaaatcacaaacacctatctgatgcttcttatgtgccaggcacgtgaccgggtcacacactgagccaacgtttgctgagcagtcatgagtgtcgggcactgggccgggggcatcaagaacacagaagtgaccgtggcatctcccttgcccctgggagctggttttctagcgggagaccctgaacattgccatttaaacacagacaattccaaatcgtggtgacaggcaggaagaaaacacgggcgtatggttgtaaggattcagaggggagtagggctggtggctcacgcctgtaatcccagcactttgcgaggccaaggcagaaggatcacttgagcccaggagttcaagaccagcctgggcaacatggcgaaaccccctctctacaaaagatgcacatattagcaaggtgtggcggtgtgggcctgcggtcccagctgcttaaggggctgaggcaggaggatcgcttgagcctaggaggcagaggtttcagtgagctatgatcacaccactgcactccagactgagtgatagagcaagaccccgtttgtaagagagaacccgggtgcggtggctcacgcctgtcattccagcactttgggaggccgcggtgggtggaacacgaggtcaggagtttaagacctgcctggccaagatggtgaaaccctgtctctactaaaaatacaaaaaaaattagccaggcgtggtggcgggcgcctgtaatcccagctactcgggaggctgaggcagagaattgcttgaacccaggaagcagaggttgcagtgagccgagatcacaccactgcactcctgcctgggtgacagagcgagactccgtctcaaaaaaaaaaagagagagagaggagagtgtttagcactgggtgatcgaggaggcccctcggaggatgtgacatttttacagaggagttgtcagaagcatgggaaggggtaggagctagcggcgttccagagagcaggaatggcaccagtgaaggtccccttgggaaccagaagaagctgacatatacccatatggggcacagagaagcgggtggagatggtgaagaggaggatgaagagttaggccgtgggtggctcatgcttgtgggaggaaaatgtatgagcgccaggtgtattttttgtatttttagtagagacagggtttcaccatgttgaccaggatgatctcaatctcttgacctcgtgatccacccgcctcagcctcccaaagtgctgggattacaggagtgagccaccgtgcttggcagagattgcgatttttcctttttttttttttttgagatggaatttcgctcttgttgcccaggctggagtgcaatggcatgatctcggcccaccataacctccgcctcccgggttcaagcaattctcctgcctcagccccattactcattcattcagtgatgatcatgagacacctgctaggtcctccaacaaacatcatgacacacctgctatgtgcccagctctgtgctgggcactggggatagaaacagctaaaacgcagtccctgctgtcagggagctcatggtctaccggggagacagacaagtccacgcagttacaacaagctcaagctgtgctgccacagctcccagcacaggcaccaagcagcacacaggccagccttgccagcgtggaacacctgaccgagtgattgcccgtcacttcttttctaaataactgcttttttttaagaagacagagagagattgagttttcgtggttgttgtttttttttttttttttttgagacggggtcttactctgtcacccaggctggagtgcagtggcgcgatcacgactcactgcagcctcaacttcctgggctcaggtgatcctcccacctcagcctcctgagcagctgaaactacaggtttgcaccaccacacctggctaacgtttttgtattttttttttgtagacatggggtttcaccatgttgcccaggctggtctcaaactcctgggcttaagcaatcctcccaccttggcctcccaagctgctgggattacaggtgtgagctaccgcaccccacgagattgagattttttttttttttgagacggagtctcgctctgtcgcccaggctggagggcagtggtgccatctcggttcactgcaagctccgcctgctgggttcacgccattctcctgcctcagcctcccaagtagctgggactacaggcacccgccaccacgcctggctaattttttttgtatttttttagttgagacgtggtttcactgtgttagccaggatggtctcaatctcctgacctcgtgatccacccacctcggcctcccaaagtgctgagattacaggtgtgagccaccacgcctggccaaaactgagatttttaaaagccacattctctgaaaaaaacccaaatgtccgttaactgataaacaaacgtggtataacaataggatagaatatgacttggccatgaaaagaaacgaggctctgacccaggccacagcatggatgaaccttgaggatgccacgctcagctgacagaagtgagacacaaaaggccacacagtgtgtgattccatttctatgaaatgtccaggacaggcccatccagagagatagaaggtggatccatggttgcctgaggcttgaggggagaagagaattggggggatacctagcaggtagaggattcctttgtgaagcgttgaaaatatcctgggccaggcgcagtggctcatgcctgtaatcccagcactttgggaggccaaggcaggtggatcataagctcaggagatggagaccatcctggctaacacagtgaaaccctgtctctactaaaaaatacaaaaaattggccgggcacggtggctcatgcctgtaatcccagcactttgggaggccgaggcgggcagatcacgaggtcaggagatcgagaccatccttgctaacatggtgaaaccccgcctctactaaaaatacaaaaaattagctgggcatggtggcgggtgcctgtagtcccagcaactcgggaggctgaggcaggagaatggcgtgaacccaggaggcggagtttgcagtgagctgagattgtgccactacactccagcctggatgacagagcaagactccgtgtcaaaaaaaaaaaaaaaaaaaaaaattagccaggcgtgatggcgggtgcctgtagtcccatctactcaggaggctgaggcaggagaatggtgtgaacccgggaggtggagcttgcagtgagccgagatcgcaccactgcactccagcctgggcaacagagcgaagactctgtctcaaaaaaaaagaaaatatcctggaattagcaagaatggtacactgagaatgtactagaagctactgtacggtatactcttaaatgattaaaatggtgaagttatctcgatgggaaaaaaaataataataaaacaggccgggcgtggtggctcacgcctataatcccagcactttggtaggccgaggcaggtggatcacctgaggtcaggagttcgagaccagcctggccaagatggccaaatgctgtctctactaaaaatacaaaaattagccgggcctggtggcaggcgcctgtagtcccagctactgaggaggctgaggcacgagaatcacttgaacctgggaggcagagattgcagtgagctgaaatcacaccactgcactccagcctgggtgacagacactgtctcaaaaaaaaaaaaaaaaaaaggccgggtgcagtggctcacgcctgtaatcccaacactttgggaggccaaggcaggcagatcacgaggtcaggagatcaagaccatcctggctaacacaatgaaactccatctctactaaaaatacaaagaattagctgggcgtggtggcaggtgcctgtagtcccagctactcaggaggctgaggcaggagaatcgcttgaacacgagaggcagaggttgcagtgagcccagatagcgtcactgcactccagcttaggagacagagcaagactgtctcaaaaaaaaaaaaaaaaaaaaaatcatgaaacaattaagtcccattctcctggtgtgatgaccaaaatggcgtgtgacaggctggagtggggcacgcatggtgtccaggagagagcaaggtggaggagataagggtgtgagaatgggtgagaggcatgtcacggggctcgcgggagacgaggccaggaaggacaggcagagtaaggcccacgtttgtgaccgggtgttgcggccgggcaagagggagcagggagtacacggtgcagggctgggcggatgctgcaggcgaggccagcgtctgagtagaaatgcccggacagaatggaagcatggcctgaggaatgagggcgtcagcgctggtcaagagggggggccaggaggagggaaccacaggagggaacctcggcccttcctcagtttcccggctccctccaggcttagcctggtcctcccgcgccgggaggagaggctgggagcccacagcaggcgcacaccagcctccgtgcgcacagccgcaggctagcggcccccaatcagcacacaaggaaaacgagaaccgggtgtggtgaagcgtcaccgctcggcccgagcacgttttgtctcccttgtgtcttcgtggcccaagcgacagggccctgtctgtgtaatttttgacaagattaaaaagggtaatactaagtaggtcaggccgcaaacggagaacgctgagagtaataacgctctcgcggccaatctcgatcacgcctctccacagagcctttggggaagggctcgcgtacctggggtttctctttggagcatccctggtaaggagacaagcgctgggggtggggagtagcagctcagagaatgaggagccccgggctccttcctggtcgctccctccacccagccccgcccctgacccaaccctgatgccccaggatcttccacaggaggagctggtgagtgccacgaacccaggagccaccggcagttataggacttatcaatgccccatgtaaccggtgggcatgaccagcctgattctgcagatgaggaaaaaaggcagggagaggtcaagtaacagctcaggatcacacagcgagtaactgcagatctgagatgaaagcacgagcaggtcttggcctcgaagcctgggtcatagccactcctcattaaaaatctttcctttagcagggcccgtggtttactcctgtaatcccggcaaattgggaggccaaggaaggaggatcacttgagcccaggaattcaagaccagcctaggcaacaaagtgttgcctgtctctatgaaaaaaataatggctgggcacggtggctcacgcctataatcccagcacttggggaggccgataggggtggatcataaggtcaggagttcgagatcagcctggccaatatggtgaaaccccatctctactaaaaatacaaaaattagctgggtgtggtgatgtgcgcctgtagtcccggctacttgggaggctgagacaggagaatcacttgaacttgggaggtggagcttgcagtgagccgagatgatgccactgcactccagcctgggcaacagagcgagactccatctcaaaaaaaaaaagaaagaaagaaaaaacaaggccagggcgcagtaagccacacttgtaattccagcactgtgggaggctgaggcaggagaatggcgcgaacctgggaggtggagcttgcagtgaaccgagatcgcgccactgcactccagcctcggcaacagagcgagactccatctcaaaaaaaaaaaaaaaaaaaaaaaaggccaaagccagccaacttccagtccccccggctgagagtgaggggaacagctcatttctgtagctgtcttggaggatcagggcagggggtgtgactaaattggaaaagggaaggtcaaatccagctttgcctctctgttcccaaatatcccctccaccatccagtgagcgcttcctaagtgtcgatgtgcaatttctcaccggactctcccaggagcccgctgaggggtcagcactaccaaatcctctgttttagatgaggaaactgagggccgggcacggtggctcatgcctgtaatcccagcactttgggaggccaaggaaggaggactgcctgaggtcaagagttcgagaccagcctggccaacatagtgaaatctctactaaaaaatacaaaaattggccgggcgcggtggctcaagcctgtaatcccagcactttgggatgccgagttgggtggatcacaaggtcaggagatcgagaccatcctggataacatggtgaaaccccgtctctactaaaaatacaaaaaattaaggccgggcgcggtggctcaagcctgtaatcccagcactttgagaggccgaggcgggcggatcacgaggtcgggagatcgagaccatcctggctaacatggtgaaaccccgtctctactaaaaatataaaaaattagccaggagtggtggcgggcgcctgtagtcccagctactcgggaggctgaggcaggagaatagcatgaatcaaggaggtggaggttgcagtgagccaagatcgcgccactgcactccagcctgggcgacagagcaagactccatcacaaaaaaaaaaaaaaaaaaaattagccaggcgtggtgggggacgcctgtagtcccagctactcgggaggctgaggcaggagaatagcgtgaacccaggaggcggagcttgtagtgagcagagaccgcaccactgcactccagcctgggcgacagagtgagactcttgtctcaaaaaaaaaaaaaaattagccgggtttggtggtggatgcccgtaatcccacctactagggaggccaaagcaggagaatagcttgaacccgggaggtggaggttgcagtgagccaagatcatgccactgcactccagcctgggcaacagagtgagactcagtctaaaaaaataaaaaataataaaaaataaggaaactgaggctcacagaggggatgtcaatggtcaagattcacagtgagcacagggcagagccaggcctggctcccaggtccacccgctcatacaacaggctcttggccccagctcccactttttttttgagacggagtctcactctatcccccaggctggagtacaatggcacaatctcagcccactgcaacctccacctcccaagttcaagtgattgtcctgcctcagcctcccgagtagctgggatcacaggcacccaccgccatgcccagctaatttttgcatttttagtagagatggggtttcaccccattggccaggctgatctcaaactcctgacctcaggtgatccacctgcctcggcctcccaaagtgctgggattacaggtgtgagccactacgcctcccaactcccacttctaagaggttattccccgggactcccatcctccagggcctgcccctggcttgtaccagccagaaggaaaagaatgccagcctgggagctggggggccagggagtcaggggatctgggagttgggggacctgcaagctgggggccctggtttctgaccccagctcagctctgttgctcacaagcttgagaaccctggacaggtctctctacctcttcatctaccaagcaacaaggatgtattaggtgggatccttctaggtcaaatgtctagagacattttggtcatcaagattaccagtgggcgctccttgcatggagtgagcagaggccagagatgctgctcaacaccctgcaatgcccaggacagaccctatgccagagaatgacctggccccaactgtcactgctatactctcttataaggtactgatgctgagaaaccgtggcctgggtctacaaggcttcagacaccagctgggtccctctgggcatctaagcaaatttttttttttttttttttttagacagagtctcattctgtcgcccaggctggagtgcagtggcagcatctcagctcactgcaacttccgcctcccgggttcaagagattccccggcctcagcctgtagagtagctgggattacaggtgcccaccaccacatctgggtaatttttatatttttgtagaggcagggtttcactgtgttggccaggctggtctgacctcctgacctcaggtgacccaccctcttggcctcccaaagtgctgggattacaggtgtaagcgtggctaatttttgtagtttgggtagaggcggggtttctttctttctttttttttttttttagatggaatctcgctgtgtcgcccaggctggagtgcagtggtgggagctcagctcactgcaagctccgcctcccgggttcatgccattctcctgcttcagcctccagagtagctgggactacaggtgccacgcccggctaactttctgtattttttttttagtagagacagggtttcaccaagttagccaggatggtctcgatcacctgaccttgtgatctgcccgcctcggcctcccaaagtgctgggattacaggcatgagccacggcacccggcctaatttttgtatttttgtagagacagggtttcattctgttggccagtctgatcttgacatcctgacctcaggtgacccctcctcagtctcccaaagtgctgggatttcaggcgtgagcccggctaatctttgtagttttggtagaatggggtttcgccatgttgaacaggctggtctggaactcctgacctgaagtgatctgcccccttggcctcccacagtgctgaggttacaggcgtgagccaccatgcctggcccatctgagcaaccccttgagtctcattctgctcatctactcaatggaaaaaatacttcccgctgttgggcgcggtggctcacgcctgtaatcccagcactttgggaggctgaggcgggcagatcatgaggtcaggagttcgagaccagcctggtcaatatggtgaaacccgtctctactaaaaatacaaaaaattagccgggcgtggtggcacatgcctgtagtcccagctacttgggaggctgaggcagaagaagaatcacttaaacccaggagacagaggttgcagtgagccgaggtcgcaccactgcactccagcctgggcgagagagtgagacaccgtctgaaaaaaaaaaaccaaccaaccaactacccacctgggccactctgaggattactgtgaggaccaaaaggcgatgcaagtggaaccaggccaagctgccatgtttcacctactggcttcgcaaggggatgggacccaggccttcctgtccgctcttggtggcattagtagttgcgctaaggctgttaaaagaatgagcctgggctgggtgtggtggctcacacctgtaatcccagcactttggaggccaaggtgggcggattacctgaggtcaggagttcaagaccagcctgaccaacatggtgaaacatcgtctctactaaaaatacaaaattagccaggcatggtagtgggcgcccatagtcccagctactcgggaggctgaggcaggagaatcgcttgaacccgggaggcggaggttgcaattagccaagaccacaccactgcactccagcctgggcgacagagcgagactccatcaaaacaaaaaacaaaaaaaaaaaaacagcagcatccgggacaaaacttggcaagaaaaacttcagggctcccatcttacacaattaaatctatgcctctaggaaaatggcccaggaatctgcatcttttttttttttttttttgagacagagtctcgttctgttgcccaggctggagtacagtggcacaatcctggctcactgcaacttctccctcccgcgttgaagcaattctcctgcctcagcctcccgagtagctgggattataggcgcctgccaccacgcccagctaatttttgtatttttagtagatactgggtttcaccatcttggccaagctggtcttgaactcctgacttcgtgatccaccagccacagcctcccaaagtgctgggattacaggtgtgagccacagtgcccagccaggaatctgcatcttaaacacacgttccatctagaagcatagatgggccagagaagctaagagcagcagtggcctcaactaaagctacttctcatcttgggggatctgtacagggcttgtttaatttcctttcctcaaagacaggcctctatataatgcttagcaagctgtaggtgtccaataaatattaaatggtgtgatgattcaccaggaggtaatgagctcaggacggaaccaaagagaacttgacctggggccagaaaaagatctcctgaaacagctaccttgaaggatttctgacctatccttccaggctggggacaggcacagcgtgaggaaagatagcaagtatgaaaccagggaaacctcagtctcctagacacaccatgggtgttaaagtaaaataccctcagcatgcaacatcggtgggccccggccccctgagaaggggctgccagatcctcggcgctcaagggacatccgttgagtgaatcctcaattctggaccatgagctcccagaaggcaaggactgtgcctgactcatccctgttcctggtccccagtgcggcacgtgtgcgtggcaggtgtcaccaccgaaacgtctgcggatcctggagcaaatgctcacaagcaccacccagcccaggccgaaacaaaggagaggcacagacaggccacctcaagaccccaggttctcaaacaggaccaggaaccacaaagagactgcatcctccactcgcaaaagccaaaggctgggcccctcctgccttgctccactcagaccacctcggatgtgcttttcttccttaatggccaagttttccctagcttgtggtcagttccctgggcctccccgccaaattcatgcccccccagctaagcctgggctactaaccccggcccccagcctgtcacagaaacctcaaaagcagtgtggttaaagcagaggaaagaaccccagcccagttcccccactccccacctcaccccagaatactcagagtaaggcacctttctcccatccttccactgccttttagccatttgccttccgcttttctaaattccttcctttccctgactatttccagacactcatttgccaatgagatgtcatctgattcttggtgtttttttccacctgactgagaacgctcacatctacacactacagacttttcactcctctaaaatctggcagtaacagtgaaagagggggctcttctcaaaagaaaaaaacgtcttttcctaagaaaataaaaggttttatgagagctatgataacactctgttagaaattcgggctggccaagcgcagtggctcacccctgcaaccccaacactttgggaggccgaggcgggtggatcatctgagttcaggagttcgagaccagcctggccaacatggtgaaaccctgtctctaccaaaaatacaaaaattagctgggtgtggtggtgggcacctgtaatcccagcaactcgggcgtctgaggcagcagagtcagttggacccggaggcagaggttgcagtgagctgagatcacgccattgcactccagcctgggcaacagagcaagactctgtctcaaaaaaaaaaaaaaaaaaaaaaggctgggcacagtggctcatgcctgtaatcccagcactttgggaggctgaggcgggtggatcacgaagtcaggagattgagaccatcctggctaacacagtgaaaccctgtctctattaaaaatacaaaaaaattagccgggtgtggtggcgggcacctgtagtcccagctactcaggaggctgaggcaggagaatggcgggaatacaggaggcggagcttgcagtgagccgagatcgcgccactgcactccatcctggacaacagagcgagactctgtctcaaaaaaaaaaaaaaaagaaacttggactgattctacagcaggggttctcgccagggctgattctatcccgttcccctccacccaggggacactgggcaatgactggggacatctgtcatcaccatgaatggggtgggggtggccttggcactgagtaggtggaggccagggacactgctcagcacctgcagggcccagaatgccccaccacagggaacgatcgagccccatgtgtccacagtgcccaggggagagaccctaactggaggccccttcttgcatcagtagcgcgcttcacactggctctccaccccgggtactcaccggaggggcgctgtagctggcgtgggggttgttctggatctcccacagcccttcattgaagcctttcctcttgttgggcttcccgtacttgtctttacatttgtcgtaggggaacaggtccttgggtcccaggaaggctctggagaagggaaacgggggccagtcccaggtgagtgaggccaccccgggaggcaccagaggagaaaaccaagccccagaaggggacacttacgtttcgtgtgtgccaaagaaaaagatggggtacttgttgggtgggggcttcacggcgccatccgcgatgtcgtcgatctgcagtgagaggccagtgagggggtggctttacccactgacccaggaaatcaccgagaaatcagccaagttacttggggcaaatcacgctgggaggaggggagccttcaacccaggaagcagcagccccttcccgatgggaagctgcattcttctgtgtacccttcactgcaaagctgtgccccacccagagagctctccccctaccccagggacggagctggccccagggcaggtgctccacctgagcaaagccagatccggccctctgaagcaaccagggggtggggccaagctcagcgtctatggactcccaggacctttcctggggacccctcccgcaaagaggggctcacgggcggtcccccagaggatgcagctggcagctccaaggatgcagagggtggggggtgggctacaagaaacggccctgagcatccaggaagtcccaccctctccctgcaggcccatgggctccggcagctgtcagtcacctccccacaggagactaacagccccttcacttccaatcaggtgcttggaaacgtttggggctaggagagcaggctggagaaggggggacgggggagagaaaagcgagtgctctgggaagaagagagctgggaaagggagggaagtgcctataaagttgcattgctctggtctcccccaagaaagtcagcgcgagcacagcaggctggagtggcttctcccctcccaatgcattccttccccatccacgtctccagcttctagggggctcccgatcttccctgccccactcacccagcttccttctcgcttgggtctcctcagagctactttatcagagtccctggcccctgggctcggccatgggccgccaggcccagcatccctctcccgccagaagcatcctaaattcagtccacccgaggaccagcccggcatgcctcacagccccgcttctcccaagacccgcccacggtcctccgaggcccacccatcccagcggcattgccagcttcggacctgggctggttctggtccagagcaccgtttggtgtccccctccacagcccctccctgctgccccagccttccacccccagtgccaaattcctcagtcctgcccggcaaattccaccaacctcagccctgggagactcagccctaagacctggggatgacaatagcctggggtccctgcttcccgctggcctgtacctctcagggcctggaactcaccccctccacacctgggactccaaggtgcggaatatccttcaggccaggacacctgggactatccaggtcgtcgggaccccagcttccaccaaaggggcatccaaggtcccctcggccagcccccttccctcagaagcgctcccactccctgggcccgggcctgtctccatttcaagcattggggttggaccaccccaccctcaagtccctccaaaaccagcttctacatcctcctccccacaggggaccaatccccagggtcccccaacagtcccgatgccaacttcattctaaggtccagttccccgagtcccagtgaccccgtgaacagagccccgagccccattcccccacccccagcccctcactcagaggtcccagcttcccttagccttgaccctcaaccttcccccctgactgcctcctccaaccctggacccctagcacatggccctcggccccccagcccctcaaaactgggcttctccaggacccacaagggagtgcttcagcccccatatctgaccccaaatctcaagttccgcagttctgctcaaacttgaaccttgagccctcaggcctgggatccccaggccctcaggtgagggtccctcaggtcccagaccctcccagacaccctgcgcacggctccctgaggcaccctggacacccccagacacacgaggcgtggctccctctgggccagggcaaccccagatccccatggtgcagctccctcaggcacagaagccccagacccccagagcgcagcttcctcaggcccaggacccccagaccattggcgccgcagctccttcaggccctggacaccccccagatccccacggcgcagctccctcaggtccaggaccgccattcccccagagtgagaatttatcaggccccagacccccagggcaccgcttcctcgggcccgggacccccagaccgtcggcgcgcggctctttcaggccccaaacacccccaaacccccaaggtgcgactccctcgggcccaggatacccccagactcccagggagcgactctctgagccccaaaaccctcatacaccaagggcgagagtctctcaggccgcagacaccctcagaacccctaggcgcggccccctgaggcccagggcccccagaccccggggcgcggctcctgcagggcttggacacccccagaaccccaggacgcagctccctgaggccgaggacccccagaccccgggaggggctcctgcaggcccagacggcgggtcctgcaggatccgaacaccaccagaccacaagaacgcggctccctgcagcccaggacccccaggccccgagggcggggctccctgaggcccaggatccctagaccccggggcgcggctccggcaggccccggacaaccccagacccctagggcgcagctccctgcggcccaggacccccagacccccagggcggggccgctgcgggtctcggacacccccagaccccatgaaccccagacccccggggcgcagctccttcaggcccaggacaaccccggccctccagtgcccgcctccggcccggggcccccgctgcccccccccccccccccaccggccccatctcccgcgcggcctcaccctggcaggccagtgagggtagcccttcatcttagcgaacaccaagtccccgggcttgaaggcgtgtggcatgctgacggcgagaggcccaggccgcggaaagcggctgcagcggcggtagcggctgcggcggcggcggcggcggcagcgggaggcgaagccgggggcgggagcgggacgccgagggggcgggggaggctgtctgggcagcctgccgacgcgcgcttattgggcgttgcgccaacggaagttcagccctccggccgtcacgggccggcaaagccgtcgatcaggaccacgtgcaggggacagagaagggaggcgaccaataagaacagaggttggagcacagcagttaacgggattggataacggacagacccaaggggcgtaacccagagactctaatgggaggttatgggaggtgaaagggaaaggtgggaggagacgaacagacgctctaagggagtgaaggggtggagcttaagggaaagaggcaggacatagacctccacaagagaaggggatataaggagggcagaacattggataccgcagaaaagaaggccaatcacttaacgcaatgggcgggtcattgacagcctctcccgctcaggaggagaggcttaaagtagatatgcaagccattggataccacaagagaagcgcctcaaggtagggagcaggcattggccatcacaagaggcggggcttcagcgggaacgtcggccattggctatcgaaagaagagcgatacaacataaaacagggacgggcgattgccagctcgaggaggcgggacttagaggaaggggcaggctccgggggagctcttagtataaacagccacaaaatgcacaaaatagttatttcttcacttagttaaaaacttaactgagtacctactatatgccagggccccaaaacgccacacagacctattcattcattcaagaaaaatgtactgaataccgtggggccgagtcacttgattgtcctgggcttcgctctctgcacttggaagatggggcccataatgattgtgaggaccctgctctagactgagcccggcaacaggaaatacaggaagtattagaagctataactcggccggacgcgatggctcacggctgtaaccccggcactttgagaggacgaagcgggcggatcacgaggtcaggagtttgagaccaagcctggccaacatggtgaaaccccgtctctactaaaaatacaaaaattagctgggcgtggtggcacgcacctataccagctactcaggaagctgaggcaggagaatcactcgaacccaggagcggggggttgcagtaagccgagatcgcgccactgcactccagactgggtgacagagcagaaaaaaaaaagctataactctaccttccggcagggcgtggtggctcacgcctgtaatcccagcactttgggaggccgaggtgggtggatcacgaggtcaggagatcgagaccatcctggctaacatagtgaaaccccgtctcgactaaaaatacaaaaaaaatagctaggcgtggtggcaggcgcctgtagtcccagctactagggaggctgaggcaggagaatggcctgaccccgggaggcggagcttgcagtgagccgagatcgtgccactgcactccagcctgggcgacagcgcgagactctgtctcaaaaaaaaaacaaaaacaaaaaacaaaactctaccttccaggaatcaagtataacagggccaagaaatgttaagttttaaaatttgttgatgttgctgtgttttgttttgttttttgtaattaggatccatggtaagaactaaaatgaaccagggtgcttgaggaaaaaaagctgaataatggagacgacttcttctctcctgggggatcacagagggttactggatgaagtgagtttaaccagacactgggagaatgaatagaagttggacatgatagtgaggcgagccctgggagggcatgaggagcagagggaagagcaaaaacaagcgtctgatcctcacttaaggtcaggagtacgagaccagcctggccaacatggtgaaatcccatctctagaaaaaatacaaaaattagccgggcgtggtggtgggcgcctatactcctagctacttgggaggctgaggcaggataatcacttgaacctgggaggcggagggtgcagtgagccgagatcacgccgttacactacaacctgggtgacagagcgagactccgttgcaaaaaacaaacgagaccgggcgcggtggctcacgcctgtaatcccaacactttgagaggccgaggcgggtagatcacttgaagtcaggagtttgagaccaccctggccaacatggtgaaaccgcatctctactaaaaatacaaaaaattagccaggcgtggtggcaggcgcctgtaattccagctactcgggaggctgaggcacgagaatcacttgaacccgggaagcggaggttgcagtgagccaagatcatgccactgcactccagcctgggtgacagagcgagactttgattcaaaaaaaaaaagaaaagaaaagaaaaagcaaacaagcaaaaacaagaacaacaacagcaacaacaaaaaacccatctgatcctaggatgactgtgtgtgagtaggggaaacagataaagctggagggctggaggggtccgtagaggacctatcacaatacattacaaacataaatgagaagtttgggttttattttaacttcttgggaaactattggggggatctgatcagaggatacaaagagagtattttattctcaaaaaacatccctatgcatgtgaaatatggatcaacaaagaccatttctttaaaactgaaacgtaaggcctggcatggcatctcacaccagtaatcccagcacgactgaggtggaaaattcgcttgagcccaggagttcgagaccagcctgagcaacatggttaaaccccatctctacaaaaaatataaaaatcagttgggcatgatccgcacacttctactctgagctactcaggaggctgaggaatgaggatcgagcccagggaggcaatggttgcagtgagctgagattgcaccactgcactccatcctgggcaacagagctagaccctgtttcaaaaaaatacaataggccgggcgcggtggctcacgcctgtaatcccagcactttgggaggctgaggtgggcagatcacgaagtcaggagtttgagaccagggcagccaacatagtgaaaccccatgtctactgaaaaacaaaaattagctgggcatgatggtgtgtgcctgtagtcccagctactcaggagactgaggcagggagaatcgcttgaacccggagggggcggttgcagtgagccgagattgcgccactgcactgcagcttgggcaacagagttagacttcgtctcaaaaaaataaataaataaaataaaaattaaacataggccaggtgccgcggcttatgcgtgtaatcccagcactttgggaggccgaggcaggtggatcacgatgtcaggagatcgagatcatcctggctaacacagtgaaaccccatctctactaaaaatacaaaaaattagccgggcgtggtggcgggcacctgcagtcccagctacttgggaggctgaggcaggagaatggtgtgaacccgggaggcggagcttgcagtgagccgagatggcgccattgcactccagcctgggcgacagagcgagactctgtctcaaaaaaaaaaaaaaaaaaaaaaagagtttgagaccagcctagccaacatggtgaaactttgtctctactaaaaataccaaaaaaattggccaggtgtgatggcacattcctgcaatcccaactactcgggaagctgaggcaggaggattgcttgaacccaagagggagaggttgcagtgagccgagattgtgctaatacactccagtctgggcaatagagcaagactctgtctgaaaacaagaacaaaaagaaaatacatagacttaccatatgacccagcaattccattcctacctgctagggactgaattttgtaccgtcctctcaaatgtgtatgtggaagcacagacctcccatggaaccatattggagatatggcctttaagaaggctgaccaggcgcagtcactgacgcctgtaatcccagcatttttggaggccaaggcaggcagatcacctgaggttaggagcttgaggctagtctggccaacatggtaaaaccctgtctctactaaaaatacaaaaaattagcctggagtggtggtgtgtgccaccattttgggcaggctggtcttgaactcctgacctcaggtgatctgcctgcctcggcctcccaaagtgagccacaagcgtgatccactggtgtgagccaccaagcccagcctgaggtgtctttttaggatgatgcaagctttctaaatttagattgtgatgatggttgtacaattctgtaaatacatgataaacttcattgaattatatactgaaagaggtgaaattgatggtatgtaagttatatatcagtaaagctgggtgaccacggtagctgacacctgtaatcctagcacttgaggcgggaggattgtttgaggccaggagtttgagaccaccctggccaacatagcaagactgtccgtattaaaaataaatcacgcctgtaatctcagcactttgggaggctgaggcaggtggatcacgagggcaggagttcaaaaccagcctggccaagatggtgaaaccccgtctctactaaaaatacaaaaattagccaggcgtggtggcaggcgcctgtaatcccagctactcagaaggctgaggcaggaaaattgcttgaacccaggaggctgaggttgcagtgagccgagatggtgccactgcactccagactgggcaacagagagactctgtctcaaaaaatatatatatatattgtatgtagataaatatatatataatatatattatatataatatttttatataatatatattatatattatataatatatatttttatataaatatatattaaatatttatatattattatgttatatatatttatatattatatattaatatatatttatatattgtatatattatatattatatataatacatatattaaatatataatatataatatattatatatgtgtgtttatatattagatattacatatgtgtgtatatataatatatgtgtatatatacacacatatataatatatgtgtatatataatatacatatatgtatatatgtatatatataatatatatgtatatataatataaatgtatatataacatgtatatatataatatatgtatatataatatatatgtgtatgtataatatatatgtatatatatgtgtgtatatattatatatgtgtatatataatatatatatataatatatgtgtgtatatattatatatgtgtgtgtatatatatatatataaacagacggggcatggtggctcacacctataatcccaatactttgggaggccaaggccagcagatcacgaggtcaggagttcaagatcagcctgaccaacatggtgaaaccctatctctactaaaaatacaaaaaaattagctgggcgtggtggcgcacctgtaatcccagctactcaggaggctgaggcgggagaatcacttgaacctgggaggcggaagttgcagtgagccgagatcgtgccactgcactccagcctgggctacagagtgagactccatctcaaaaaataaataaagccttttttttttttttttgaaacagtctcactctgttgcccaggctggagtgcagttggcacgtctcggcgcactgcaagctccgcctcccattgttcgcggctattgctcccgtcttagcctcccaactagctgggactaaaggcgcccgccaccacgcccggctaattttttctattttttagtagagacggggttttaccgtgttagccaagatggtctcgatctcctgaccttctgatctgcccgccttggcctcccaaagtgctgggattacagatgtgagccactgcacctggccaaagccatttttttttttaaaaagatcctttagcctgctacattgagaagggctatagttagaatttccagttaaaattcaggatgtcaagttacatctgaagagcagatacacatcacatgattttgtttgttttagagacagcgtctcacttatgtcacccaaggtgatctagaacatcagagttcaagagatcctcacatttcagtctcccaaattactgggattacaggcatgagccacaacatctggctgaatgatttcttagtataaatatctcccatgcattttatttatttatttatttatttatttattttgagacagagtctcgtactgtcgccgaggctggagtgcagtggcgcaatctcagctcactgcaagctccgcctcccaggttcacaccattctcctgcctcagcctcccaagtagctgggactacaggcaccacgcctggctaatttttttttttttttgtatttttagtagagtcggggtttcaccgtgttcgccaggatggtctcgaactcctgacctcgtgatctgcccacctcggcctcccaacgtgctgggattacaggcgtgagccaccacacccagcttatttatttttttgagacagagtcttgctctgttaccaggctggagtgcagtggcgcgattttggctcattgcaacctccactcctgggttcaagcgattcccgtgcttcagcctcccgagtaggtgggactacagtgtgcgccaccaagcacagctaattttttgtgttttagtagagatggggtttcaccctgttggcctctctggatggtctcaatctcctgacctcatgatccacctgcctcggcctcccaaagtgctggattacaggcgtgagccaccgcgcctggccaagaatttttttttttttgagataggatcttgctgtcctgaccaggctggagtgcagtgacatgatctcagctcactacagcctctacacttcgggctcaagtgatccccctgcctcagcctcctgagtagcttggactacagatatgtgccagcacacctggttaatttttaatttcttataaagatgggatcccactttgttacccagactggtctcaaactcctgagctcaggcagccctcctgcctcgacctctcaaagtgctgggattacaggtatgaaccaccttgcccggccccatgcaatttttttttttttttttttttttttttgagaaacagtctcactatgtcacccagactggagtgcagtggtgtaatcttggctcactacaggcttgacctcctgagctcaaggaatcttcctgcctcagtcccccaagtggctgggactaaaggtgtgtgccactatggcaggctaatttttttttttttttttttttgtagagatgggatttcaccatgttgccaaggctggtgcaatatcttttttttcctttttttttttttttgagacggagtctctgtcacccaggctggagtgctgtgacacaatcttggctcactgcaatctcaacctcctgggttcaagggtttctcctgcctcagcctcccgagtagctgggattacaggcacgtgccaccacacctggcaaatttttgtatttttggtagagtcggggtttcatcatcttggccagcctggtctcgaattgctggcctcaagtgatccaccagcctcggcctcccaaattgctgggattacaggcatgaaccaccgtgcccggcctgcagtatcgtttaaaaactatttgttacacaggctgcaaccttaagacgatatcctcagtgaaatcagccagacgtaaaaagacaagtactgtcttatatgtatccactcataagaggtccctagggttgtcaaattcatagagacgaaaagtagactagaggttatcagggttgggggtagttattacttaattaggcagaatttacgtttcactagatgaaatgtaacgattgctgtaatggttgcacaacaatgcgaatgtacttgaggccaccgaactgtacacgtaaaagtggttaatggctgggcacggtggctcacacctgtaatcccagcactttgggaggccgaggccggcggatcacgaggtcgggagatcgagaacatcctggctaacatagtgaaaccccatctctactaaaaatacaaaaaaaattagccggacgtggtggtggacatctgtagtcccagctactcgggaggctgaggcaggagaatggcgtgaacccgggaggtagagcatgcagtgagctgagattgcaccactacactccagcctgggtgacagagcaagactctttctaaaaaaaaaaaaaaaaaaaaaaaattgcggggcgcggtggctcacacctgcaatcccagcactttgggaggccaaggcaggtggatcaggaggtcaggagttctagaccagcctggccaagatggtaaaaccctgtctctgctaaaaatgcaaatattagctgggcgtggtggctgtaatcctagctactcgggaggctgaggcaagagaatcacttaaacccaggaggcggaggttgcaatggttaagctaggtgcagtgactcatgcctgtagtcccggctacttgggaggctgaggtgggaggatcacttgagcctgggagttctgggctgcagtgacccatgattgtgcctgtgaatggccactgtagttgtgctccagcatgggcaacataggaagaccacatctgtataaaaaatttttgggccaggcacggtggctcacacctgtaatcccagcactttgggagaccaaggtgggtggatcacgaggtcaggagttcaagaccagcctggccaacatggtgagaccttgtctctactaaaaatacaaaaattagccgggcgtggtggcgtgtgcctgtaatcccagctactgaggaggctgaggcaggggaatcgcttgaacccaggaggcagaggttgcaatgagctgagatcacaccattgcactccagcctgggtgacaagagcaaaaactccgtctcaaaaataataataagaagaataatttaaagttccaacagctttacaatcaaacgctgggcgaggtggttaacaccactaatcctggtgatttgggaggttgagggggatcacttgagaccaggagatctataccagcctgggcaacctagcgagaccccatcagtataatacatatttcatttttaaaatttaaacagttatttgtttactttgagtttatcttttttttttttttttttgagacagagtctcactctgtcacccaggctggagtgcagtggcaggatctcggctcactgcaagctctgcctcacgggttcacgccattctcctgcctcagcctcccgagtagctgggactacaggcgcccaccaccacgcccggctaattttttgtatttttagtagagatggggtttcaccatgttagccaggatggtctcaatctcctgacctcgtgatccgcccaccttggcctcccaaagtgctgggattacaggtgtgagccaccacgcccggccgagtttatcttttaatggttttttgtttgtttgtttgttttttgttttttgttttgagacggagtcttgctctgtcgcccaagctggagtgcagtggcgcgatctcagctcactgcaagcgccacctcccaggttcacgctattctcctgcctcagcctcccaagtagctgggactacaggcacccaccaccacacctggctaattttttgtatttttagtagagacggggttacaccatgttagccaggatggtctcgatctcctcctgcctcagcctcccaagcagctgaagctgcaggtgcgcaccaccatgcctcactaatttttggtttgtttgttttttgagacagagtctcacaaaccagaatgcagtggcatgatctcagctcactgcaacctctgcctcccaggttcaagcaattctcatgcctcagcctcccaagtagctgggattacagggaggcacaaccagcactgattttttttttttttttttttggtagagacaagggttcgccatgttgcccagggtgttatttttattttatttattattattattattttttgagatggaggcttgctctgttgcccaggctggagtgcagtggcatgatcttggctcactgtgacctctgcctcccgggttcaagcgattctctgcctcagcctcctgagtagctgggattacaggtgctgccaccacccctagctaatttttgtattttatttttagcagagacaaggtttcatcatgttggccaggctggtcttgaactcctgaccttgtgatccacccacctcagactcccaaagtactgggattataggggtgagccactgtgcctggcctgttatttttattttttagtagaaacaaggtctcactatgttacccatcctggtcttgaacatcagggctcaagcaatcctcctccctcggccccccagtgttctgggattacaggcgtgagccactgcgcaagattgaacaatttttaaaaaattacccggaggccgggtgcagtggctcacgcctgtaatcccagcactttgggaggctgaaacaggcggatcacctgaggtcaggagttcaagaccagcctgaccaacatggagaaaccctgtgtctactaaaaatacaaaaaagtagccaggcatggtggcgggtgcctgtaatctcaactactcgggaggctgaggcaggagaatccgagagatggaggttgtggtgagccgagatcgcaccattgcactacagcctgggcaacaagagcgaaattccttctcaaaaaaaaaaaaaaaaaaaaaattagctgagtgtggtggcacatgcctgcagtcccagcttcttgggaagctgagtggggaggactgcttgagctcagaagttctaggctgcagtgagccatgattgtgccactgcactccagcgtggggaagagagtaagaccctgtctaaaaaaaaaaagaaagctgggcatggtggctcatgcctgtaatcccagcactttgggaggccgaggcgggcggatcacggggtcaggagatcgagaccatcttggctaacacggtgaaaccccgtctctactaaaaatacaaaaaattagccgggtgtggtggcgggcgcctgtagtcccagctagtcgggaggctgaggcaggagaatggtgtgaacctgggaggtggagcttgcagtgagccaagattgtgccactgcactgcagcctgggcaacagagcgagactccatctcaaaaaaaaaaaaaagaaaagaaaagaaaagaaaaataaatgttgtcctcccaaagtgctggaattactggtgtgagccaccgaccgctcctggcagaaatgttaaattatttaatctcataacctcatccgacatgaggaagatagtccaggagagcgtcatggtggaagaggattgagttaggcagaggaagagaagtcccttctggtaaaggagaatgcctaggcaaaggcccagaggtgagctggaaatacttccaggtaactgaggcagaggtggaaaggtgggtgataacaagaaacggggtttctgaaaccctcagaatacttagaacctgaaatagaaatttattagggcctattaatgttaggatctccttagaccaggctgaggaaccccataggattttattcttggagaagtgggatgggtctctgccactttccagctgtgtgactttggcccagtgttgtacctttatttgagttatagggtatacaattccttattcacaacaatgagctgtaattttcttttcttttctttttgagacggagtcttgctctgttgccaagctggattgcagtggcgcagtctcggctcactgcaacctctgcttcccaagttcaggtgattctcctgccttagcctcctgagtagctgggattacaggcatgagccaccgtgcccggcatactgagaactttctaatcacatgatcacccctacaatctatagagagtgttattcttatccccatttcatagataggagactggagatcagaaagattgaagtttgggttgcactgtattcttcttttatttatttatttttttactttatttatttatttttgagacagagtctcgctctgtcgcccaggctggagtgcagtggtgcaatctcagctcactgcaacctctgtctcctgcgttcaagtgattctgctgcctcagcttctcaagtagctgggattactggcacacaccaccacacccggctgatttttgtatttttaatagagacggggttttgctatgttggccaggtcggtcttgaacttctgaccttaagtgatccacccgccttgacctcccaaagtgctgggattacaggtgtgagccaccgcacctggcccaattcttttccttttttttttttttttgaaacggagtcttgctctgttgcccaggctggagcacagtggcatgatctcggctcactgtaagctctgcctcctgggttcacgccattctcctgcctcagcctcccaagtagctgggactacaggcgcccgccaccaaggctggctaatttttttaaaaattattttcagtaaagacagggtttcaccgtattagccgggatggtctcaatctcctgacctcgtgatccacccgcctcggccttccaaagggctgggattacaggcatgagccaccgtgcctggcctttttttctttttttaataagacagggtctggctctgttgcccaggctggagtgcagtggcgtgatcctagcttactgcagcctccaattcctgggctaaagcaatcctcccaccttggcctcccaaaatgttgggactgcaggcctgagccacccgtccaacccatgatatttcaatttcagtcttggggtgggctgtttcctcacctggaggcttctcctccatcagtctctgtgtatctcattccaactccttcttttttgaggcagagtctccctctgttgcccaggctgaagtgcaatggcgagatctcggctcactgcaacctccacctgccgggttcaagcgattctcctgcctcagcctcccgagtagctgggattaccggtgcccatagagacaggctttcaccatgttggccaggctggtctcaaactcctgacctcaagtgatccgccggcctcggcctcccaaagtgctgggattagaggcatgagccaccacgtctgacccccaactcccattttttgaggcttgttttaactgtcactttgtgtatcttctttgtggattgcacagaccaaagtacgccactattaactggtgtccaccaaagtggatccccaatccccaggtcccaattgggtgcattgggtgcatcctctttttttttttttttttttttttttgagacggagtctcgctctgtcgcccaggctggagtgcagtggtgagatctcggctcactgcaagctccgcctcgcgggttcacgccattctcctgcctcagcctcccgagtagctgtgagtacagacgcctgccaccatgcccggctaattttttgtatttttagtagagacggggtatcaccgtgttagccaggatggtctcgatctcctgaccttgtgatccgcccgcttcggcctcccaaagtgctgggattacaggcatgagccaccgcgcccggcccaggtgcatcctcttaaacagctcctacctagggtacgtggtgatggtggcgggggggtgcttcaggcaccaaaacaggccagatcgtgggggcctccaatacccaacattgaattgggattttatcacgtaagctctggggagacagagaaggttggaattttttttgttttgcttgagacagggtctctctctgtcgcccaggctggaatgcagtggcttgatcacagctcactgcagcctcgacctcttgggttcaagcgatcctcccgcctctgcctcccaagtagctgagaggcgcgcgccaccaccctcggctaatttattttattttattttttttttttttatagagacgaggttttgccatgttgccaggctggtctccaacttctgggatcaagcaatccttccgcttgagcctccaaagtgctgtgattgcaggcgtgagccaccgcgcctagtttaggttgagcagcgaaagggatagggcccagtgctttctctgcgaggttcagttggcctgtccctgtcctatcaccgtttgtcaccgtttggggagcgccacggaatgccctgtctccaatcgagaggtgcactcgtcgccctggcaacggagtccggaagaaccacagagacgcggctccagcgtacagagcggccgccctgggccagcaaggcaccgagcgctagagaggcacgtctagtcgattgtcacgtggcaggccaggggaaggcgggacttccggcggcgaggtaaattttttttttttttttttttttttttttaattttcttccggtggctggtctccggcggccccgtccccgactgggccccgtgcccccccgcccccgcggccccccgccgccgggccagccgccaccatgaagaaattctttcaggagttcaaggccgacatcaagttcaagagcgcgggacccggtcagaagctcaaagagtccgtggggtgcgtgaggaaccaggggcttgaggccctgcggggcggggacggccggggagagagatctggggccttggcggctcgggagatcggagaggatgaggggctgggagcggccgcgagggtcaggggagggggagaggcgccgggggcggacgaagtcgggccgagggtgggcgtcagggggaggggagagagatctgggggcggggcaggagggggcgggtatgacccgggggcgcggcgggggaggcgaggggaggggaactagcgcagggggcggggcgggaggggaggtctcgggggcggggccgcaggagggtccgatgcagtggcgggggattagggcgacggggctgtaggcagttgggggtcagtggaacgacctttggggaaaaacgggatcatgagtcctgagccgggtggtgagggagagctctgtctggggacccggctggccgaagaggccgggatgatttggggcaatctaggtgaccatggatgggagctgagcttggaggaggacgcacagctgtggggtggggtggtgaagagttgttttgaggtatccatgggaagaggggttctggatttggtatctggagcacgtgggaggctgatgggagactagaaagagtctggaaggccagggaggccggggtgggcagcgtcgtcagtgacctgggatgtcctggcgaattgagagggaggggctgaggaaggtgtgtgaggagagtggaggtgagggattctgacagatggactcttacccgggaggggcctgagaggagaagacgggtgagacagacgcgtcttagcaggctgggagaaagagcttctctgcgaggcttctctgccacgtcactgtgccaagtggattatggaagtgggagaggaggggaaaggagatagatgccgggcaggcttccggattgtctagggaggacttggagagaagggcctgagcagggctgagccagctgggagggccggggaagaagtggagctagggaaggtgcaaggctgagggctgttgggttgagaaaagggaaactggagagctggggccgctgcagggagctggctggccagagggtggtggggactgatggagagggactgaggaagtcagccaggcagccaggacacgggtctgtaagcaatagtggaagggattgtgagggagtgggggctgggagaggcagggaggtggcaggaagtgggggtcaggaatcacggggcagtggggtggtgatggaggtaggggcatagtgaggacgtcagggttcctgggggagagcaggagagcaaaggctgagtgagggagggagaggggtcagggagagaagggggcaaatcgggggagcccttcattgattcaaccaatagtgggtggggggtgctggggccactgggactgggcatgataggaaggatgcagggtatcggggtgatggctggatcagcccagagcctgggcggagaggggaaggttggaggggaaggttgggaaaggaagcggtgcggaggtcccttgtggagcgagactgcatatccagggtgtgtggggtgggtgggcaccaagtcctgttttaggctgcagtggtggacaggagaaggcctctgctgtcccagggctcaccttctagagggagccgatggacaaataaaccaacagaccttggatgagcgctcaggcgatgagtgcttggatgagtgcccagggcctccaaggagggtgagcaggggccgtcaggtggtttgggaaggcctctcccaggacacagtgagactcagctgtggggaaatctgcccctccttctctccctgcggcagctctagccctttccagacccccatcctcctcccactcccccggagaacattctgggcagaaggtgcagacagtgcaggggcctgcagtggggagcagctggggtgtgggaagaactgcggggagcccaggggagacaggccacgggagggcagtgggccaggctgggaagggctctctggccaagggaagctttaggattttgcagtgggagggcgttgtgcagtggagtgatgctgacgctccctggctgaggttccagaagggtccctgtggctgcccaggggggcagggtccatggctggttggggtgaggtgccctgggaaatggcattttgttggaaagacccagatatcggatgaggccggggtgggtcttcatgagtcatctcctcttccacccaagatgctcagctgtgggaggactagataggcaggggtgggacgaggagggagggctgcccgggtatgtaagcagagccagaggagtatagggcttgaactgagagcctggcctcccagaaggttttaatagacctacggcacagaaattgacacagcccgtaagttcatgggaggggcctgagaggagacgggtgagacagacgcgtccgagcaggttgggagaaagggcttctctgcgaggcttctctgccaggtcactgtgccacgtgggttacggaactctccttggtgtagggctcaacagggtggagccacgagtccatgagctcttcgtacttgcacagccctaggcctggcatggagtggccagggcgaggctggttctgctgtccgctctccccagggtcccgccacgagggtggcgtggcatggggcacatcgcccggacttcctgtccctcttgggtttaggaatgggatggtgaggcctccctggcagcttgttaggaggagtaaaccaagcgagccgaccagctcccagcagggtcctggcacacagtaggtgctcagcaaacgaagctgtgacctgagggtggagagtcttatggcagggagggagggaggatgtgacaccccttgagtctcctcaattcctgaggatgcgggctgggtgctgtggctcatgcctataatcccagcagtttgggaggccacggtgggaggatcatttgaggcaaaagttcgagaccagcctgagctacatagcgagaccctgtctcgatagaaaaattagccaggcatgatgatgcttgcctctaagtcccagcgacttgggaggctgaggcgggaggattccttgagcctgggagctcaggattgcagtaagccatgatcgtgccactatactccagccttggtgagagagcaagaccctgtctcaaaaagaaaaaaagcactgaggatgtcaaggtgccttcacctcaggaggggtgctgtcaccccattttacagatgaggacgctgagggccagtgggggcaggacttgcccgatggtgcagagctgagtggaaccagcatctccttcctccaggggctcttccgcctgcagtagaaccatctggtggctgcaggtggcccctgggaaccaggtgtcctggcccacataggcagggacacgtctggctgatggtgctggggaggggcagaagctcctctgtgtgactgcacgtcagctttgccggccacctcgggaggatacactcactctccctcggtctgttcccagggaaaaggcccacaaagagaagcccaaccagccagcccccaggccgccccgccagggacccaccaatgaggcacagatggcagccgctgccgccctagcccggctggagcagaagcagtcccgggcctggggccccacatcgcaggacaccatccgaaaccagggtgagatatggccctcctcgggcccaggttggggctgtttgaggttctcggccctggtgcctggccctggatgcagaagtcacatgagcaaccgtgggggtgtgagggtcacccttgggagcggctcatcaagggcaggtgctgggggaagggcagcttcctggggagggggtgggagcagagacttggagcagaaacgggctgcccaggcagtggggtgcttgctcaggctgaggggtggctgcacagcaagtcctgcaggggacctccagcctgacctccagcagaagcaggctggggcggtgtgcgtggcccccaggcccaccccgggaatgagggggcttgggccaggacagcggcgtgctcactatcccgtctctgcctctctttcttgggctgccttccagtgagaaaggaacttcaagccgaagccaccgtcagcgggagccccgaggccccagggaccaacgtggtaagaacagccactggtggcactgtcccatgccaaggggtggggacagcttgactgtgtcacgggggagatgtggcctctgcccttggggctcaagggctgttggaaaaccttgccttgcaaggtggacacaggttgtggtggaacacggtgttgtctgggaccttcggggctcggcagctgaggatgccggctcaggcctggagaagtgggcctcaggtacacgagcccatcgctccctccccttaaccccttaagggcagatgcagttacagtttccactattcaaaaagagaaccggggttgagagaggtgaaaccagctgtcctctctcctacaccccaggaccagcaaaggcaggaccagagccagtctgtggtttcagagcctgtcccctagcactgcccagtcctgcctgccttggaggtcaagaggctctgtggagacgggtggaatcagggaggccttcctctaggaggtgggccttcagagctccgctgaaaggagttctaagcagcttgaccctcgaggattcagtgaattttagcacgcagggaccttagagatggcctagaaatggaggcccagaagtcatgccttgtccagcgcactgtgcccgcagacacccacacagagctccttcctcaacagcttggggacaggaccagcaggaacccagctgccatctgctgggtgtttcctgcgtgtcagaagctgctccgtactttccgttccttacctcgtttagttctgagcaggccccacagggacatttgacataccagggaaaagactcggggatccggtcacttggccagggtgtctcccacggccaccaggtggaagggacagcatgggggctggagatgtctggttctacgggccacactcaggactgtggtgctcggcgagggtcggggtggcctctgtccacggtccagacttggacgctttcaccgccccaggtatctgagcccagagaggaaggctctgcccacctggctgtgcctggcgtgtacttcacctgtccgctcactggggccaccctgaggaaggaccagcgggacgcctgcatcaaggaggccattctcttggtgagtggcaccctgtgtgctcctgccccaacctgtagcttcctgtgcctgagccaccctccatcggaagcccaggtggtacagatccctcccagagtccccagaggccactgctagtagtgaagcccctcctctgataccccaaatccaggcacaccattgtgtatgcatctgtatctcctctctcccaactaggtgtctttttttttttttttgagatggagtctcactctgacacccaggctggagtgcagtggcgcattctcggctcactacaacctccgcctcctggattcaaacgattctcgtgcctcagcctctcaagtagctgggattacaggcacctgccaccatgcctggctaatttttgtatttttagtagagatggggtttcaccatgttggccaggctggtctcgaacttttgcctcaagtgatcaacccgcctcagcctcccaaagtgctaggattacagacgtgagccaccacgcgtggcctggttgtttttcataaaaggttaagtattatttgcttcaatacagaaagaacttcctacaaaattagccaggcatggtggcacatgcctgtaatcccagctactcgggaggctgaggcaagagaattgcttgaatccaggaggcagaggttgtggtgagccgagatagcgccattgcactccaacctgggcaacaagagcaaaactccatctcaaaaaataaaaacgtccacagcatttttttccaatacagcaagtcctcacttaacaccatcaataggttctcagaaacttcggctttagcctgggcaacatggcaaaaccctgtctctgccaaaaacaaaaaaaaatagctgggcatggtggcgtgcacctgcagtccctgctactcagaaggctgaggtgggaggattgcttcagcctgggaggtagaggctgcagtgagctgtaatcatgccactgcacaccagcctgggtgacaagtgagaccctttctcagaaaatagtaagtggctgggcgcggtggctcttgcctgtaattccagtgctttgggaggctgaggcaggtggatcacctgaggtcagaagttccaagaccagcctggtcaacatagtgaaaccccctatctactaaatatacaaaaattagccaggcgtggtgacaggcgcctgtaatcccagctactcaggagactgaggcaggagaatcgcttgaacctgggaggtggaggttgcagtgagcccagatcacgccattgagctccagcgtggacactgggtgacaagagcgaaacttcatcttaaaaacaaaacaaaacaaaatagtaatagttccatagactctccagactcacacccactccagcagtgtgtgcaaaagcacccgtgtccccatcctctcaccatactgtaaatcaccaaactttgatctttacgcctgttggtaggtgaaaataacatctcaggatagagttaatttgcactttccttattttggattggccatgtttcatatgagaatgcgtcctttctacattatttagtagatagtttgtctttttattagtgatttgtaggcactcttttttttttttttttttttttttttttgagacagagtctcgctctgtcgcccaggctggagtgcagtggcgccatctctgctcactgcaagctccgcctacgaggttcacaccattctcctgcctcagcctcccgagtagctgggaccacaggcgaaccgccaccacgcccagctgattctttgtatttttagtagagacggggtttcaccatgttagccaggatggtctcgatctcctgacctcgtgatccgcccgcctcggcctcccaaagtgctgggattacaggcgggagccaccgtgcccggcagcactctttacatattaggcaatttaggcttttgcctatgatatgagttgcacatgtttccctctagttgcttctatgttggctctgcttatggtcactttgctgtgtaggattttttgatctctgtataattaaatgtgtcagttttagttcatggcttttgggtttggggtcattcttagaaatgccttccccatttccatgctgagagaattcttttgtggcctctccagtgctttttttttttttttttttgagacagagtcttgctgtcaccaggctggagtgcagtggtgcaatctcagctcactgcaacctctgcttcccgggttcaagcaattcacctgcctcagcctcccaagtagctgggactacaggtgcacgccaccacacccgggctaacttttgtattttagagatgaggtttcaccatgttggccgggatggtctcgctctcctaatctcgtgatccgaccgcctcggcctcccaaagtgctgggattccaggcatgagccaccgtgcccggcctccagagcttttcttctggcttctccttgactgcttgcttgtttccatggttgaagctttgatccagctggagcatgttattatgtaacatggtgggatggagctgatgtaattttttttttagatcttggctcagctttcttctcagccccacctgtcgagagcacctgtcttttgcttacagctgtgaaatcccacctttctcacaaagtacattcctgtatggatttggaccccttcctggctgctgttccttcgtcccttgtctgtgcatgtacccagctcctgacctaagcctggcagccagtcgcccaaaacgcccgaggcccgcttttggagctgacacgcttcccttggctggtgtgctgtcccgggcgctctgatcccaaggaagctgttgtcttggggacatgcccatctggcagctctgcctctctgcatccacgtgctctgtcccgctccccacatcatctcagcaactaaaccggcagactgggccgggtcccaattttcagttggcatgagccccggctcagtgtgtaggtcattggtccgtgtgacgcagggggctgctgagggaccctgctgtgcagttgagggtggggggtggtgggtggagctctgggctgcctgggcaggtggcccgaatcctgacacatggccctgggctgcccttctgttcacccgccctcgtctgggcagcccagggaggtgcgggtggcagccctgcttcccaggccatgggtggctctctgggtgtggccgtgtgtgatggctgtgccgagcgtggatttgtgccccaatcttttccaggtcttagggtacgtactgttctcagcctctccatgctgggacgctgttcgcagtcagcagggctggttctgggaaacccccagagttccagctatgacttctcccctcccccggtaacataggtggataggtgggacctcggggaggggcaggggctgggggtatccgtcttccagctattgagtttcagacattgagggttgcagactcatttgtgtcctctctgccacctgccatccctgtgaccctggacgatgggcctctcggtctctttgtaaacatgaggcccgggagtggttccagaacgtccatcatggggctgcgagagcaggagggatggggcgtccatggtggcgggaggttctgtaagtggcggtggccttgatggatctcagcactgaggtcgagttctaaagccagagtgtgaggcacagttctgtcgcgtcacactggcttccaagtcccatggatctagccttgagaaggcggaaggggagacttgagttctgctgggtcttggctgcgtcgcctctgccctggggcgtgggcagggctgcggtcttggagggtctctcttttcctttctgtgatgagcgcacagctggggccgctccaagccgctgttctgccttccttttcctgcccctgttacctgggcagcggagggccgtgcggcccgggctctcagtgagtggctttccctgcttccctcctcccagcacttctccaccgacccagtggccgcctccatcatgaagatctacacgttcaacaaagaccaggaccgggtgaagctgggtgtggacaccattgccaagtgagcgtgtggcccctttgccctgcctggcccctccagctcatcccagcacccctcccactggggctgtcaccccctctggccccctcattacctgctgaggtgggttgggaaggagcataggccgagagtgaggcagctccacccagaggcctcaggcaaagggctgggcctccttgggcctcagtttacccgtgtgcaaaatgaaggtgttgaaggaatcaggggtttcccaccctggcttccttggggaacatgtggaggaggcagggtcccaccccactccccgggtctcaggatcgggggcaggcctggaggtccacgctgcccgccaacgccgagggagcaccccgcaggagccccctgctggcactgcggcccttcagctctggctctccactcttccggcactgtggcttccccaccgctgtggttaattgtgcccttccagggctggtgggacggtgaggggttccgtggggctcctgctggcaccaggggtgggctccatggggtgtccgaggtgtgccttccacccggagatggtctgctgccctcgcgtcactgggccgcttcttccctctgactagaggccaagtgtggctgagctgctgttacctggagcaggaggcacagaggggccgggtgggcagcctgggctgtgccccactcaccttctccacctaccccaggtacctggacaacatccacctgcaccccgaggaggagaagtaccggaagatcaagctgcagaacaaggtgtttcaggtgggcgtgccttctggcccccggggcccaggctgggggtgggggcagctggcctgcaggagccggtggtggcccacaccaggcggtgggctccctggaggagctagcgagagttgagccacaagcagtgaagggttcggccagtagaaggtagcaggacaagatggagagcaagacttttatgcaccggtcaccccaaatcaacaaattctgcctctcctcacctgcatccttttcctcctcttcagctgggcttgtttgggaacatgtcgactctggggaggtttctcatgcaaaccagatgtctggttcttctgggggaaagggcagggactggggtcctgggcggtgttagcctcgcatcaggccccagcagtgtctggctcctcagcctcactcttcgtgcctggttgtgactctttcctctgtgcagagctgttggagactccacagcccccaccgtagaaaagcaggtttgcatccagcactgaggcacccccagggctgggccccatccaggggtcgacagctgctcccaatagcgagagccgggcccctggactgggtggggtgtggccaggccatggaggaagccaggggcccccagtgacgcccatctccacccccaggagcgcattaactgcctggaagggacccacgagttttttgaggccattgggttccagaaggtgttgcttcccgcccaggatcagggtaagtggacagggcctggctgagtagggaatggggacgaggggcctcggggcaggagggcccggcttgggggtctctccattgcacagtgacacccatgtcctgccacgctgtagaggaccccgaggagttctacgtgctgagcgagaccaccttggcccagccccagagcctggagaggcacaaggaacagctgctggctgcggagcccgtgcgcgccaagctggacaggcagcgccgcgtcttccagccctcgcccctggcctcgcagttcgaactgcctggggacttcttcaacctcacagcagaggagatcaagcgggagcagaggctcaggtgggcctgacgtccgcggagcagagtggggcggggcggggtggaagaaccccggccagccctcgtgacctggcccgcgtgtgcaggtccgaggcggtggagcggctgagcgtgctgcggaccaaggccatgcgggagaaggaggagcagcgggggctgcgcaagtacaactacacgctgctgcgcgtgcgcctccccgatggctgcctcctgcagggtgggcaccaacgatgcccgtggagggcggctcgggttggtagggggccctgggccccacccgctctgactcccccactccccaggcactttctacgctcgggagcggctgggggcggtgtacgggttcgtccgggaggccctgcagagcgactggctgccttttgagctgctggcctcgggagggcagaagctgtccgaggacgagaacctggccttgaacgagtgcgggctggtgagtgtcggcccgcaggagcaccgctgacccgatgcctctgcaggttctcctgggaccggcacagacacccccaggagggagcctccttgttctcagagcagggggcctgggcaggtccctgggtttgaatcctgctttcccacttactggcagcagggcctcgagcaagttcataactactccacgcctcagtttccccatcaaatgggagcggtgacgtgcgttagctagtgcagtaggtttaggcttaggtcctggagtcccggagggagagggcaggaggcctgggtgcgagccacagcctccaccagctgagatggcttccaggccggggcatccccgcgcccaggttgcccgctgagttccctgccgcggcaagggccgactctcggtctcagagtgacggcctacccctaccgcaggtgccctctgccctcctgaccttctcgtgggacatggctgtgctggaggacatcaaggccgcgggggccgagccggactccatcctgaaacccgagctcctgtcagccatcgagaagctcttgtgaaataaaagcagggttggcctcagccctgtgggtctgtctcatgctctccctgttcctctccccgccaccccagggcctccaagccacctctggaaatacttggctctgccccatgggcacgggaggggcgccagccgtggagctgtggaattgggccccgtggcagagcccccatcccttgggggctgtggggatgcgcccaagcccccgagggagaggcctggggacaccaacaaatctaagccctccctagctgcttggtaactgtgtcatgaagctgccggacagacacacgtggcatctccctgggcaggagagcaggcctgcagcatgggtcctgttcccgtgtgccgtgggtggcagtggctgcacctggcactagggctgctctgtggatgtgggtgacaacggcaggaggggatgctggccttcctgcacatagacctgcagttagtaaatcataagcccaaataaacaggttgtttgaatatagtttcttggttctccgttgaaaccgtgggacacagggcaggcccacctgctgaagagcggatggcttgggggctgggtgtggctccctgtcaaggtgggaccatgtggatacctgttctcaggccagcacctggccacaagtgcccgatgagccacccacctggggaggaagtcccgtgcgctaggggaggctgtgctgtgcccacaaaggcccagtccctgcaggggaggcgagtgctgtcacaggcctggcttccctgtggccagagggacagggtgtcctgagacggccacatcctattcctggaacctgcagatgcgcaacttcacctggcaagaggggcttgggtatgatgaaaggtcttgagctgggagatgatcctgggtggtccgggacccagtgtcctcacaagaggtggcaggagggtgaatcagagagagactggaagaggctgcgcatggctgtgaaggtggaggaagggaccccgagctgagggatgcagcgcctccgagcactgggaaactctccaggagggcctggtcctgcccacagcttgatgttagcctggcggggcatgtgtgcactctgacccccaagctgtgagatggtgacttgctttaagccaccaggtttgtggtacagcagccccaggagacacagggactctgccctgcagtgtggaaggcatgtgtgccccggccccactgctgacttggggatgcaggtctgcacctgggggaggtgcccggggcctatgctcgtgcccctgaccttgcattggtccctccctcgcccccggcactgccccagctggtgtgggcacccggcctgttgagaatggaggctgtcactccagtcctgcgtcctgcaggccccaggacctgattccgggttgtcgggagcccctgtaaagctcatcaaaggtgtggcacaggggcagcctctgcttcaggcacagctgaatcctgcttcccagcaggaaggcctggcccgggcgccctgccgtccctgactgggtggatggaggtagctgacacttttcccacatagggttccctgaagggaagcttaggacttcaggtggggtgtggctgggaagagcaggactggcgagcgtgaccctccccgtggctgcgtgtgctctgagctgctcagtaccacagcggctgtcgcctgtcctccctcggacagtgtggataaagcccactcaacctggggcggggaggaggtcaccttctagctccagcactcgcaaaagatgcacctgacctggggtgggctctcacaaagcctcagactcgaagccaaactcggctcccagcagctccgggttcagggaggtgaccctagcaggtctctgggaacaccctctcctaaccccccaacccagggcaggagggatcgccggacagaagcacgtgcggaaaaacccgcaccttgacccaggtcagcctggtatgagggtgacttagtgacaaacagatgggacggtgctgttgcagggcacaaggctggccccagacaccaggcaccacatggggccgggccatgggcaaggtgcactctcagagaaacacaatgttttcggaaaagacagacagagcagctcagggctagagaataagtttatacactgcctcgttaggtccaggggcccgcgcacgtggccaggcgggtggtcctgacgcttcaattcatttacaagtattggattccacgcctgctcctgtgcccgcaggcttccccaataggccagcaatctcaataatgctttattaaagggcagattcatatgcggctcttgggggaatttttacaaatatcaaaggaactaatccagcatcctatatagaactctgcacactttggggaggtccgtgaagcaggacaaagtgctctttacacaggaattgagtcggttcaagtatctgctctgtggggaggacaccctaagcattctacatacgtcacccctgctctcaggatgcacccagtgggctcgaggtcagggtggccttgccggtgtccacccccacaccacccccagctccggaagcggctccacacggggcttggacctctgcagggcaagagagggagggtcttgagctggctgggccctctgggctccctgggggaagaccccaccctgctgcctcatggggcctgcaacaaccccagggcgggaccctccacctgacagtggggacaggcagaggctggggcgttgtgcctcttctagaggtgacctgctcacctgctctcaggttgaccctgcctgccccccaccacccgggcacactcctcccacgcagcctgctgcagggcctctgtacttcctctttggcgagtgctccagaaatccacctggccctcccttgctgcctcagtgcagccttccctgacccccatctaacgtcacaaccacctgagactcccagcataggcccttgtggctctgcggccagaacgatgcctggcatggtcagcacccacggcccagcccgcccgaggatgtggcagggcaggagccacttccagctgcaagccctcctggctgctcacagtggagctagtcttaggcagccccatcccttctctgttgaggtttacctccagcgcccacctcaccagtgcgttctgctatctacagcccttctcacccgcagcatccgggacatccacgatcatacagtcgccctcctcctcttcctcctcctccgtgtctgcctggaagccgtccatgtcttcagcaccaatctggacagacagggtacacggccatcagcactgcaggcagcagccaccctggtgccagtgcggtagcggggggaactccacaggtgtgacaccttcctcccacccccaacacggaaggaaaccaacatccagaacccaatttggtaacaaactgtccaaatgtgagaggtttattcaagaggccacaaccagagaaccttgggggttccctcaaatgaactggattcagatctccaaaaacagccatcattgccaactgcagaataatttccagtcagtgacaggccgcatacctgatagtggccccatcagattacaactgtatttatttatttttatttttttttgagacggagtctcgctctgttgcccaggctggagtgcagtggcgcgatctcgactcactgcaagctccgcctcccggattcacgccattctcctgcctcagcctcctgagtagctgggactacaggcgcctgacaccacgcccagtttgtatttttagtagagacggggtttcatcgtgttatccggatggtcttgatctcctgacctcgtgatccgcccgcctcagcctcccaaagtgctgggattacaggtgtgagccaccatgcctggcctttattttttatttttgagacgggagtttcactctgtcactgaggctggagtgcagtggcacaatctcagctcactgcaacctccgccacccgggttcaagcgattctcgttcttcagcctcctgagtagctgggattacaggtgtatgccatcacgcccagctaatttttgtatttttagtagagacggggtttcaccatgttggtcaagctggtctcaaactcctgaccttatgatctacccacctcagcctcccaaagtcctgggattacagacaactgtatttttatttaatatatataaatcttgagacagagtcttgccatatatccaggctggagtgcagtggtgcgatcttggctcactgcaacttctgactcccaggttcaagtgattctcctgcctcggcctcctgagtagctgggattacagccacctgccaccacacccggctaatttttgtatttttagtagagatggggtttcaccatgttgccaggctggtctcgaactcttgacctgaagtgatccgcctgccttggcctcccaaagtgctgggattacaggcgtgagccactgccccagccgcaacgatatttttgctgtgcctttttttttttttttaacaggtgcccgccactacgcccagctaatcttttgtatttttagtacagacgggggtttcgccatgttggccaggctggtctcgaactcctgacctcaggattcgcccacgtcagcctcccaaagtgctgggattacaggcatgagccaccgcacctggcctctgctgtgccttttctatgttaaagacacatataccactgggttacaagtgcctgcaggatggagcagtcagtcacctgctgcacaggtccacagctcaggagccctgggctatgtaccacacggcccaggcgtgtggcaggctgtccatctaggatgtgtaagagcaacctagccccacccaaccatgaaattgcctgaggacacctctcagaacacgtccctgatgtgaagtgatgactgtgacttgtgaattattattattatttttttagacctcgactcactgcaaattccacttcctgggttcacaccattctcctgcctcagcctcctgagaagatgggactacaggcacccgccatcacgcccagctaatttttttttttttaagtagagacaagggggtgtcactatgttgcccaggctggtctcaacctgggctcaagccatccttccacctcggcctcctaaagtgctgggatgacaaggtgtgagccaccgcacctgaccctagtaagattcctgagctgtttccatttgctttcaccaaaggagaaagacaggatgcgtagaggccaccatgagcctccacgtcagtgcttaccctctctgtgcatgaacacaagcccatcccaggacagacagccacacttatttcagtagggaggatagtcctcaaaaaattccaggaattcttcctctacaaaaacctagaaaagtgaccgcacagcaacacaacggtcaggccatagactggtttcatgggctgtcatgtaagagcacagtgcctggccaggcagactgggttcctaccgtagcctcatcaattcctgggtaggggctcccctcctggatcctctcttcagtggctgggagcccaggctgtccctctccccaggcagcatgggttgaccctgtgaggacacaggagaaacatcttgctctgtcacccaggctgtggtgcagtggtgcaatcacaggtaactgcacccttcaactcctggtctcaagtgatcctcctgcctcagcctcccaaagtgctgggattacaggcatgagccactgagcctggcctacggccattttcaactacctttttgaaagaatagttaagcaaagaagagtctaagagtcccctgtagacgctgctgaggagggacattctgatctggaggtgtctggggacgttaaacaaaagaacatgccaatttcttcagagccacctcaagtcactgggccctccctccacacaggagacgcgttgacacattaggcttttcttggatccaaaatttttcagagcaatcaccactcttcaccctctaggctgaagacaggatttaacacataacaccgagtcccactgtgctgagctgccggcagcttgcttcacggggacagctgtcatctcgccagcagcactgcaagtgctaaacacagacacggaggagcgcagactacggaaaacaggagtcaggaaaacgtttaacgactacatgggatgaagatggtgtcactaacatttgtgcctttttgtcttttttttttttttctgagacgcagacttgctctgttgcccaggctggagtgcagtggcacaatctcggctcaactgcaacctccacctcctgagttcaagtgattctcctgcctcggcttcctgagtagctgggattacaggcgtgcaccaccatgctcagctaatttttgcatttttagagatggggtttcaccatgtcggccaggctggtcttgaactcctggcctctcaagtgatccgcctgcctcggtctcctaaagttttgtgattacaagcgtgagccactgcacccagccatctatgctttttttttgagacagaatcccgctctgttgcccaggctggagtgcagtggcgcgatctcggctcaccgcaagctccgcctcccaggttcatgccattctcctgcctcagcctcccgagtagctgggactacaggcagccgccaccacgcctggctaattttttgtatttttagtagagacgggtttcaccatgttagccaggatggtctcaatctcctgaccttgtgagccacccacctcggcctcccaaagtgctgggattacaggcatgagccaccacacccggccatctatgcttctttagttttattttgatcacataatgttttgttggcaagggcaaacacatccttccttgtattttaaaatttttaaataaaacggaggcccgaagagttgaggtgtcctagggcttcacagatacatggcacttcaccccactaggtcagaatgccttaagaatatctcttttgagctctaagtaaaaagatttaaagactccctggctcaggtctgtaatcccagtactttgggaggccgaggcaggtggattgcttgagcccacaagttcaaagaccagcctgggcaacacagcaggacccaatatctacaaaacaaaacaaaacaaaacaaaaaaacctcttcttgcatgaacatggatgaagctgggaaccattatcctcagcaaactaacgcaggcacagaaaaccaaatatcacatgctctcacttataagaacatgtggacacaaagaggggaacaacagacactggagcctatgtgacggtgggagggagaaattcagaaaaaataccttagtacccaataaatcatctatacaccaaacccccgtgacatgagtttgccaacctgcacatgtacccctgaacctaaaataataaagggcaacagggcaagaccctgtttctaatttaacaacaagaaaagatgccgggcgtggtgtctcacgcctgtaatcctagcactttgggaggccgaggcgggcagatcacaaggtcaggagatcgggaccatcctggctaacacagtgaaaccccgtctctactaaaaaaatacaaaaaattagctgggcgtggtggtgggcgcctgtagtcccacctacttgggaggctgaggcaggagaatggcgtgaacccaggaggtggagcttgcagtgagctgagatcgcaccactgcactccagcctgggcgacagagcgagactccgtcaaaataaaataaaataaaataaaaaagatgaaaactttcaaattgggaaaaaaagtgtaaccgagtaaaaaatatggatgtacaccacttgcagatgaatggcttatccctccccttgggtgcagaagcatcagtcagcagctttattaaatgccaggaggctggagagaggatcgctagagctcaggagttggagaccagcctgggcaacatagaccctgtctctacagaatatttgaaaattagttgggcatggtggcacgtgcctctatactcccagctccttaggaagctgaggcaggaggatcacttgcgcccaggagtggaggctgcggtgagctgtgactgcaccattgcactccggcctaggtaacagagtgagaccctgtcaaaaaaaaacagaggatgccagggcacatgtcccatccgggctcatgtgcttccacagccccacctttgggtcccacctgtgtgcccctccccacacaagctctgaaaaaaaacacaggaccagaccctgctccccagggacgtttatgtcccaaactgcaggaggttcaggggtgggggttaagcatcaagctgggcctgggtctccattccttcacgtgtgaccttcgtgcgtccgctgcactgctgagccccaggaggccctcacctgtgccacgcagcagaggccaccaatcacgcgcatgtggccaccactgccatccattagcaggtgagatgctgtgttttgctaactccaaggcccacccaacctctctgacccactctagttaaactgggtgcacccttctttccttgtggttagggatgataaacaggcactcactgcccccgaagcacagtaactctgatgtggtgctgggcacatggggctcagggcgctattttccgggtggggaaacatgggttccacatgttgacagggagcaagagcagtgtttgggaggaccaggggcggggcactgcaccccagctgggagaggcagctgctgcatcaaatcagtggagaggggtggggaaggaggccgtccagggcctggactactgtgtggagcatgaggagaccccaaaggaacatctgagggacacaggggttcccaggggagggctgatcagcaaaggccctggaaaactgcttgcatagtgacacaaccagatagtaccttcccgccccgatcattttcaggctggggagctccggttccctctaaggctgctcaggtgaccagggaaaggcactgctcacacagggcttgaacaaagaatgcatccagcaaagctctgtgtgggggcctcctgtggccccagctccaatgcactgagcttcccacggcgccaagccgcctccacagagccaggggaactatgcacatgacacactgtacagggacagaggctctagggagtgccaggaacagtttcagtcgtagccctggaccctttgggatgttatgatggcccctcctgctgtgacagctgagggagattcacagcatattaaggcccatggctgtgtgctggcagcagggagatggctgagcatcatctcaggagccatttctctcgcctccctgcccctaacgaccaccttttcttttcttttttttttgggggactagaatcttgctgtgttgcccaggctcgagtacaatggtgtggtctcggctcactgcaacctccacctcctgggttcaagcgattctcctgcctcaacctcccgagtagctgagattacaggcacctgccaccatgcccagctaatttttgtatttttagtagagacagggtttcaccatgttggccaggatggtctcgaactcctgacttcaggtgatctgcccgccttggcctcccaaagtgatgggattataggcgtgagccactgtgcccagccaacgaccacctttaacatcagagaagaggatgcaagctggggccgggggttatccactgtcttgctccttgtcccaagtctctgaaaacctgtaactccatcagatcgtggccttgaaggaaagcccaaggttcacagggacagataggtctgcgttaagtgtagatattagaaatcaaactcagggagccaggcacggtggctcatacctataatcccagtactttgggaggcaaaggcagggggattgcttaagcccaggagttggggaccagcctgggcaacatggtgaaaccctgtttctacagaaaattagctgggtgtggtggcatgcacctgtagtccctctcagctactgaggaggctaaggtgggaggatcgcctgagcctggggaggtcaaggctgcagtgagtggtgatcacgccactgcactacagactaggcaacagagtaagacccctgactcaaaaaaaggccaggacaggcgtggtggctcatgcctgtaatcacagcactttggaaggctaaggcgggcggatcacgaggtcaggagattgagaccacggtaaaaccccgtctctactaaaaatacaaaaaattagccgggcgtggtggcgggcacctgtagtcccagctactcgggaggctgagccagaagaatggtgtgaacccgggaggcggagcttgcagtgagcccagatcacaccactgcactccagcccgggcaacagcgcgagactgtctcaaaaaaaaaaaaaaaaaaaaaaaggaaaaaaaagaaaaaagagaaactcacttccgaacactgtgtggtaaggacaaaaagtatgcaatgaacgttaacaaagccgatctatggccaggggtgggtgccaggggccagtggctctctgggcatgagagtttcttaagaccagacagtgcccccatcacacaccccagggctccatgcgcttgtgcctccgaggcacccataaggctggaatcacacagccattcattccccttacaggctcctgtctgtgccttacaccgggcggtgttctgcatatacctgtgtctgagagaccgatcagagtgcctggagcacagtaagtgcttaataactgtgcttgaatgcaaaattcaagaaccgttgaacaaaaataaaaatgctaccacatggaatattattcagtgtgaaaaaaaaaagagctatcaagccacaaacagacacggaggaactgtcaacgcatactgccaagtcaaaggagccacacacgatgcgattccagctacagggcaatctggaaaaggctgatccacggagatagagaggttggtgatttccaagggattggacgggcagagcacaggggcctttcagtggggagaagcctctttgtttaaaacaataaaggtagacgcacagcatccaacattcattcaaatcacagaaccctcaacaccagcaacaaaccctagtggtggtgataaatcaacgaaggtgcgttttatgtatttatttttagagacagggtcttgctctgtcgcccaggttgcagtgcagtggcatgatcatagctcactgcagcctcaatctcctaggctccagtaatcctcccgccttagcctcctgagtagctgagactacaggtgcatgccaccgcttggctaatctaaaaattttttcttagagatggggttttgccatgttgcccaggctggtctccaactcccgggctcaagtgatcctcccgcctcagcctcccaaagtgctgagactacaggcgtgagccacagtgcctggcctgaggtgcactgattgtaaccaatgcaccattctgggaggtgatgttgggtggcttggcttggctttggggaaggaggtgtatgggaactttctgtaccttccaatcgattttgctgtgaccctaaaactgctctaagagtaaggttatttaaaaaacacaaaaacaccaggcgaggtggctcacgcctgtaatcccagcactttgggaggacaaggcagacggatcatgaggtcaggagttcgagaccagcctgaccaacatggtgaaaccccgtctctactaaaaatacaaaaattagccaggcatggtggcgtacacctgtaatcccagctactcaggaggctaaggcaggagaatcacttgaacccaggagggaggaggttgcagtgagctgagattgcgccactgcactccagcctgggtgacagagcaggactccatctcgaaaaaaaaacaaaacaacaaaaaacaaacaaaaaaagaaaagccctgcagaggcccccacctgcccaccccacctcacctggccgtcgtgcctgcgcttcttcatgaattgggtgatgcacatgctgcccgctgacttcctcttcagcgagatgggagtgccctggctgggccccgtggaggggacgctgccactgtcctctttgggggccgagggcaccgatgtcacatagctccactggcacggcacgggcaggtgctcctgctggaagctctgtagcacctgcgggtgcacgtaccagcacatcctgaagtcaggccgcttctcatacactgagttctcggaaatgagccgcttgagccgggacttagaggggatggcggcatcctcgctgggggtgggggtgtgcaggtaggtggtggaggggctccgcgggctgccggtgtggttgctgagcagtccccggcggcagtgctcctggaactcccggatgatgaccttgctcccgttcacattgccgtgcaggagcggcagcagctgggccaggactggcaggagggaacatgggtgggcatgaggcttggggagccacccatcaccacaggccaaaaaacaaaacacatacacaagctcattgccaccgaggcttggggcatggccagcttcggggataggtggcctcatgagggcgggtgtaagacagggtagcacctacgcacctgcccagaagtgagccttggccgggcacgtgtgttgccagggctgacttcaaatgcctgctgttcctacccaaatgactgccctgctctccttgtgtgccatggtccctccccagttttttgagtttttttttttttttagacagggtcttgctctgtcacccaggctggagtgcagtggcaggatcatggctcactgtggtctgaaactcctaggctcaagcaatcctcccacctcagcctcttgagtagctgggatcacaggtgcgtgataccacacccaggtaattttgcattttctgcagagatggggttttgccatgttgcccaggctggtgtcgaagcactaggctcaagcgatcctcccaccttggcctcccaaagtgctggcatcacaggcatgaggcactgtgcccggcccctccctggcttttgagaaagcacagcccccactccagcactctctgtgcctgtgtcctggttgataaaacaagccaattaagggacctgcctcgtcctgctgctagggacatcattgaacgtacggacatgtacaggaaaagggctggcctctgttatttgtggaaagaacatttgcatcacggacccactagcctgtgactcttgccctcagccctggaattagctgggcccaggaacaggtgggtggcctggccccgcccacactcactctgctcgtctctcctctcccgcttggaggccttgggcgtctgctcctcctgggccggcagggtctccaggaagcaggctgcgaactgctgcagtaccttcaggtcatcgcctgcgcagtctctgtcagccgcccacacgcagccgatcttcacaggttgcaggacgcgaaagcgcttccccttagccaggaactcgtcccactccttggccttcagtttctggcggaccttatggttctcagggtcggcacactccttgtggtttagaaagcagaagtttatttggggttcttgctcccctatgcccgggcactcttttgaggaaccagtccccagccagctggggagcaagaggaaaggacaggggcacaaaacttcccacagtgtcagggccagggcagagcacaccatgcgctggctgcccctcttccagatggaataattcacacctggtctcctttgggagcgtcacagatatttctgaactcacccatgaggcctcttttaacacccctctgaattttctggtgaatgtgtgatcgtggagccgtttaacagggttgggtgtctacccacatggcccaggcatctggcagacacatgcagggcctgagaccactctctgactgacagttcaggcctcggtggtcagatatgcacaaggaatgcctaggcctccagtccaaccatgagacagtcccaccaaatccccacttcccaaacgacaggccttcaaaacaaaacaggaccaaaaacaacttgcttgaaagcaagttcctgccgggctcggtggctcatgcctgtaatcccagcactctgggaggccgaggcgggtggatcactggaggtcaggagttcaagaccagcctggccaacataatgaactcccgtctctactaaaaatacaaaaattagccaggtgtggtggcacacgcctgtagtcccagctacttgggaggccgaggcaggagaattgcttgaacccgggaggcagaggttgcagtgagccaacaccgggccattgcactccagcctgggtaacagaatgagaatccgtctcaagaaaaaaaaaaaaaaagacagttccacaaccttatggaatctggaaaggggtggcaggcaggttcgcctgcagagacgtgggcaatcttctggagagatagggaagttctgttttatttcgggcggtggttgcccacattcacttgattgttacgtcatcaaactcaacacttacaatgcacatgtcttgctgcatgctgactgtatgtcagctcgggtggtttccagccttctaacccacagaccatggccacgctccctcaccagggtgtctgctcctatggctcccctcgcttgcaagctcctcctacgtctgccaccctcccaggtaataccaagttcaggcccagctgttcccacgagtgagcttgcgtgcttggaatgcagtccaaatctcgtatggttgggctgggacccccgtcaccctcccaggtcaggccactgagcaccagtccagaaatgaacttttgctgagccggtgacctcccccttcactccctcacctctgtcacaccttcgtcctcagacaggtacccatggggcacaaagaaaccatcgtcctcatcttcatcctctcccatgtcgtcatcatcatcctcaaaaggagaaaaaaaaaagagttcatcagatagaaaagcagagtgtgtgccttattaaaaacaaagtaggccaggcgcagtggctcacacctctaatcccagcactttgggaggctgaggtgggcggatcatctgaagtcaggagtttgagaccagcctggccaacatggtaaaactctgtctctactaaaaatacaaatcttggctgggcatggtggcacgcacctataatcccagctactagggaggctggggcaggactatcacttgagcctgggaggcagaggttgcagtgagccgaaatcgcgccactgcactccagcctgagtgatagagtgagactccatcttaaagaaacaaaaaaatgtaaagctgtgaacatctgctttgcatggcctcccgacagacacggtgagcatcggcagaaagcccactaggtcacagcagctgggcagtcaggaggaaatggtgtgcagcaggcccgcaggaggcaagagggggctgtggggccacggtgcagatgcggacgggatcccatccccagcagccacgtgggcgagtgtcaccagatgagatttttcgagagaagctggaagtctggatgttgaggtgcgttcaggtttcagaccacacagcaggtcaaacaccagctgtcagtgagtgaacacagctgggctgcatccttagcccctcactgtgggacagagactcaaacacaagccgtctgtgagtgaagacagctggggcacatccttaccccctcactgtgggacagggactccccaggctcctcttcttcccactcctcatcactgtccacctcatagtccaggagcttctgagaaaagaaacacatgggactcacaactgtctttggggctggaggaaaggggcacagtgaggaggtacggggacggaggcactctggggctagctcaccgtgtcctgggcccaggggtctcgcgcgcggatgagtgccgtcttcttattccaggtaccccagtaggcaggccggtggttctcacagaactgcaggagcttcatcctgccaaacttcctcctctcgggaacaccgtcgcccttcccacgctccacgatgacgacatcactgagaaggaaaaccccaggctcaggatcacgctgccttacagacctgctcacaaacctcccaggaacctccctgtgaagctggcctaacaattctagaaagatgggcatttgttaaaaagcagcactgcctgtccccaaagaaaggtcaggaacatggactgaagggacagatggaggagggtgcagcctgcagggtgagagggaggacagctgcccaggtgcagccccagagcatttttagcaagggaggttctgtggaatgagatttgcaagagcgaggtgttggggggtatccttcactggagaccagcagggaaataagattcctccacgaggagctgggaagacagggagaggaagacttcaggagcttacaggaaggccaggtggagagaggcctgagccagcaccgaagcccagggcccgagggcactaggaagcaagcaacagaaggacccagagctcccaccccggggaccccagggttcaggatgctggcctccagcatcactagtgggtgaaggccgacctcctcaggctctgacctgttaaaaatatctgcattccgggtggaaacgtgcgtgggtccggacctcaggggctgccggcctttgaggtctttcaagaaggagaactcgccgctctgctgctggaggagctggtccagctgactgcagaggtctggatggaaagcggtccgacgccgaggggccaggaccatgtgctctttaatttcaaagggggcaaacttcccacaggagccggccagggtctgaaatcaagaagagacccgatggggtcttcgagcaatgggagaaaggaggcaccatggacgcacacagcagggtgctggtgggattcatccaggctaaggccaaggcacagactcaaaagcccaggcactgtgtgggtccacagagccgagtttccagagctacagggcagagggcagattggcagtctcaagggccggcggtggggggacagactacaagggagctgttttgagtgatggaaatagggtttatcttcattatggttagctggccctgtcatttgtcaacacaaatgtcctgaaaagagtttattttattggatgtaaattatatctcaacaaacctcacttaaaaaaaaaaaaaaaaaaggccgggggcagtggctcatgcctgtaatcccaccactttgggaggctgaggagggcggatcacctgaggtcaggagttcgagaccagcctgcccaacatggtgaaaccccatctctactaaaaacaaaaattaggccaggggcagtggctcatgcctgtaatcccaccattttgggaggcggaggaaggcggatcacctgaggtcaggagttcgagaccagcctgcccaacatggtgaaaccccatctctactaaaaacaaaaattaggccaggggcagtggctcatgcctgtaatcccaccactttgggaggctgaggagggcggatcacctgaggtcaggagttcgagaccagcctggccaagatggtgaaaccccgtctctactaaaaatacaaaaattaggccaggcgcggtggctcacgcctgtaattgtagcgctttgggaggccgaggcgggtggattgtctgagctcaggagttcgagaccagcctgggcaacacagtgaaacccggtctctactaaaatacaaaaaattagccgggcacggtggcatgcacctgtagtcccagctacttgggagcctgaggcaggagaattgcttgaacctgggaggcagaggttgcagtgagctgagatcgtgccactgcactccagcctgggggatagagcaagactccatctcaaaaacaaaacaaaacaaaacaaaaattagcttggcatggtggtgggcacctgtagtcccagctactcaggaggctgaggcgggagaatcgtttggatctgggaggcagaggttgcagtgagcccagatcacgccactgtactctagcctgggcctgaggcaggagaattgcttgaacctgggaggcagaggttgcagtgagccgagatcgtgccactgcaccactccaacctgggggatagagcaagactccatctcaaaaacaaaacaaaacaaaacaaaacaaaaattagcttggcatggtggtgggcacctgtagtcccagctactcaggaggctgaggcaggagaatcgtttggatctgggaggcagaggttgcagtgagcccagatcacgccactgtactctagcctgggcaacagagcaagactccttctcaaaaaaaaaaaaaaaaaaaaaaaaaaaaaaagacagggtctttttttgaaagatcacaactcctcttttttttttctgagatggagtctcgcttcattgcgcagcctggagtacagtggtgcaatctcggctcactgcaacctctgcctcctgggttgggcgattctcctgcctcagcctcatgagcagctgggattacagacgcctaccaccacgcccggctaatttttgtatttttagtatttttagtagagacaccttgttggccaggctggtctcaagctcctgacctcagatgattcacccgccttggcctccccaaatgctgagattacaggcataagccaccgcacctggccaaaaggagaaatttcagtataatgaaagacactgtagctgggcgtggtggctcacacctgtaatcccagcactttgggaggccgaggtaggcggatcacctgaggtcagtagttcaagacaagcctgaccaacatggaaaaaccccgtctctactaaaaatacaaaattagctgggcgtggcagcacatgcctgtaatctcagctactcgggaggctgaggcaagagaatcatttgaacgcaggaggcagaggttgtggtgagctgagatcatgccactgcactccagcctgggcaatgagcgaaactttgtctcaaaacaaacaaacaaaaaacaacaaaggccgggcacggtggctcacacctgtaatcccagccctttgggaggccgaggcgggcggatcacaaggtcaggagatcgagaccatcctggccaacacggtgcaaaccccgtctctactaaaaatacaaaaaattagcggggcatggtggcgggcgcttgtagtcccagctactcgggaggctgaggcaggagaatggtgtgaacccaggaggtggagcttgcagtgagccgagatggcaccactgcactccagcctcagcaacagagtgaaactgtgtctcaaaaaaaaaaaaaaaaaagactgtaaacaaagaggtaacaggctgagacgaaatatcacggagaatgaaatactagactatgttaaaaaaaacttacagatcaggcaaagaaaaaaaaagaaaatcctgtagaaaaataggtaaaaaaataggaattggcaagtcatagaagaactaaaatggcaaacgaacagaaaaagatgctcaactgcaccaagagtcaagtaaaaatggaaagtaaaacaatgtcaatttttaaaaatccatcagactggcaaagttaaaagaaaattaatcccataaaaattgcagtgatagcagagaatggggaggaaatttccacacatcgccgggaatgtacatctgagtttcccatctggcacgcactctggccatggctcatgatgcttcagcaatatgctattttgtcctagaggtgaactcatgcttacttggctgtcccagaggaatgcatgtgtgcagagaagcatgtgcagggaccccccctacaccactgaggggcaaagaggttgagatagtggcaggctctgtggctcatgcctgtgatcctagcacggtgggtggccaaagcgagagaaatgcttgagaccaggaggtcgagaccagccctggcaacacagtgagacccagtctctactaaaaataaaattagggaggctgagatgggcagatcatctgaggtcaggagttcaagaccagcctggccaatatggtgaaaccccgtctctactaaaaacacaaaaaattagctgggagtggtggcaggcacctgtaatcccagctactcgggaggctgaggtagaagaattgcttgaacccgggagacaaaggttagagtgagccgagagatagcgccactgctctccagcatgggtgacagagcaatactccgtctctaaataaataaataatttttgtaaaaaaagagagaaaccatatcattgcattatgaagtattatgcggcagtgaaaatacatgatgtggatctctggctgtcacaatatgatgtgtaggtacaacaatgtcacattgtgcaccttcaggatacacaattgccatcaaatgtctcaacatacaaataaaaggacaggccaggtgcagggactcacacctgtaatccaagtgctttgagaggccgaggtttggaggatcatttgaagccaggtcgtcgagaccagcctgggcaacatagcaaaacccagtctctacaaaaaaaaattaaaaaattaggccgggcacggtggctcacgcctataatcccggcacttcgggaggctgaggcgggcggatcacctgaggtcaggagttcaagaccagcctagccaacatggtaaaaccccgtctatactaaaaatacaaaaattagccaggtgtggtagcatgtgcctgtaatcccagctacctgggaggctgacacagaagaatcactggaacccgggaggtggacgttgcagtgagctgagatcgcaccactgtactgcagcctgggtgacagagtgagactccatctcaaaaaaaataaaaataaaaaattagccaggcatggtggcacatgcctgtagtcccagctactcgggaaggctgaggtgacaggatcaccagaccctgagaggtcaaggctgtggtgagctttgattgtgcaactgcactacagcctgggtgacagtgagaccctgcctcaaaaaataaataaaggccagatacattaaaaagaatgaaatacatctaaatgtggcaacatggcacaaatctgagatagctaagtacacatgtgtataaatacagtgagtggagcagggaaaggcactgaaggacccctaacattggagatgggctccctctgggtaaaggggaaggagggctgtggtttccatgcacagatggtggctcagaaggtctgagatgccaggtgaccgacgccaggcagggaaagtaaacctttgtgaattgtactgttgttttacagctaaacgtgctccctccttaagcctaagtttcccaagggtaaaaacatggtgaatttctcttacgcctaacacaaaattattcatgaagtaacctctgaaaacagcactgtttaatcagacatgccactttttacctctttgggacaaagcgaaggacaaaatattgagcctcaagacttaaccagaaatggaagtgccctaggtcactggaggctccctccctcctaatgagagaagctggctggggagagaccctttcactttcagaaaggaaaagtctagcagagctgaaacccaaaagcaaaggcagccggctgctcaccttgggggcctgtggagtctttggtttctggaagaacctcgtgatttcggccttctctgctttaatgcgctgtgatgttaagagatggtgatgagaaagaggagaggaagaggaacagtatgtgttgcaaaacatgcaaaggcccccagaaccgaacgtcaagcattttagcttgaaggcactactgtgattttcagctctcaaaacccacggacccgcaactgagccagccaatctcaaaatgtccaagttgcccttgtgggtagaagtgccaggattgcagggccagtaggcatgtgacagccagcactgggaagaagcaacaagaacgcatctagacagactcgccctccctgcgggcgccatttggtttccccaaaccaagagaatattaggtgacggctgtggcaagaattccactttgggcatctgcttctccaacgggctgggacggggaagctctgtgggaaacactctaccttctcttcttctcttaaccgtttctcttcttcctttttccttttttcctcaagtttagccctgtgagacagcaaatgacatttcagccgactctttgctttggctctggaagggaccgcagcactcaactgttagtatatggcaagtatttcattttacattaaatgaatataagttattttcatgtctagtataaggcttttacataggtcttcacaataaaaatggaaaacagtcaataaaattcttcctgtgactagaatatatataaaaaactttagccagtcagagcacaattagcacagacaaaacccacaatcctgcaatgcaaatgcctaagttggttgggaactggaaggatggtcacagcagagacaaggggtccagggtgagttggacgtgggggagcactaaagagcagggagctgctttccaccgctcccacgtcagggccccacgggcacctcacgaaggagaaatgggaaggaactgaagggagccgccatctgcctgtgaagtggaaaggccccatcagagtggccaggagcggaatccagcagcagggtggcgggcccagcatggcctccaaggacactcactccagggcttcctgtctctccttgcgccgctcctccttgagccgctgcttctccgccttctccttctcatccttctcccgcttctcccgcctctccttttccttaagctccttctcttcctccttcttcttcttggcctcctccttggcccgcttggcctcctctttcagcttctccttttcttccctttctgcacgtaacttgagctgcttgcccagacgctcctgatcctacaagacagtgtggcaagtgacaggtggccctccctccaactcccaggaggaagctcggttcacagcatggaggacagcacggcctggacgggatgaacagaattgagggaccaaggctaggcatggtggctcacgcctgtaattccagcactttgggaggctgaggtgggtagatcacctgaggtcaggagtttgagaccagcctggtcaacagggtgaaaccctgtctctactaaaaatacaaaaattggctgcgcgcggtggttcacgcctgtaatcccagcactttgggaggccgaggcaagtggatcacctgaggtcaggagttcgagaccagcctggccaagatggtgaaaccccatctctactaaaaatatttttaaaaaaaactagccaggcatggtgggcgcctgtaatcccagctactggggaggctgaggcagaagaattgcttgaaaccaggagacggaggttgcagtgagccaacacggtgccactgcactccagcatcagtgacagagtgagactccatttaataaaaaaaaaaaaaaaaattagccaggcgtggtggagggtacccgtagtcccagctactcaggaggctggggcaggagaatcacttgaaccaggagacgtagggtgcagtgagctgaggtcacaccactgcactccagcctgggcaactgagactcagttaaaaaaataaatgaataaataagaattcagagaccagctccaggaggagcctccagtcaacaactttacacagaagtgattttatttttcttgagacaaagtctactctgttgcccatggtggagtgcagtggtgcagtcatagctggctgcagcctcgacctcccaggctcaagtgatcctcccacctcaggctcctgagtagcaggggctataagcacacaccactatacccagctatttttgtaattttcctagagatggggttttgctgtgttgcccaggctggtcttgaacacgtggcctcaaacaatccttctgccttagcctcccaaagtgttggaattataggcatgagccccagcacccagccacagaagtgattttcataatccattatgcttccttccatcatgagaaaaatgttaagaattagccctgtgtcctggtacttgtgggaaattcaatataagattcatttaaaacacaatcctgctgggctgagggggctcacacctataatcccagcactttgggaggctgaggcagacaaattgcttgaggccagaagtttgagaccagcctggccaagaaggtgaaaccccaagtctaccaaaaatacaaaaaaattagctgaatgtggtggcgcacacctatagtcccagctactcaggagtctgaggcacaaggatcgcttaaacccacaaggcagttcaagatcacgccacggcactgcagcctgggtgacagagcaagactctgtctgaaaaacaaaacaaaaaaacattatttatttatttggagatagagtctcattctagtgcccaggctggagggagtgcagcaatgctatcttggctcactgcaacctccgtcctgggctcaaatcagtcctcctgcctcagcctcccgagtagctgggaccacaggcacctgtcaccacacctggctaatttttgtagagatggagtctcactatgttgcccagactgatctttaactcctgcgctcaagcaatctgtccacctcagcctcccaaagtgctaggattacaggcatgacccattgcaaccagcccaggaattctttttctttttagtagagacactacgttgcccaggcttgtctcaaactcctgggctcaagaaatcctcccactttggcctcccaaagtgtgggattatgggggcgagccactacgcccagccttgtttcaaattctttaaggaagtaacacttcatcactacgttcctcattccaaagacttggcagtggcctgggacactcagtcattacgtaatctgaagttcaatgttaaacatgctcagccaggcgcaggctcccacctgtaatcccagcactttgggaagccgaggcaggcggattacttgaggtcaggagttcgagaccagcctggccaacatggtgaaaccccgtctctactaaaaatacaaaaattagctgggcatgaaggcacgtgcctgtaatcccagcttcttgggagaccgaggcaggagaatcgctcgaacctgggaggtggaggttgcagggagccgagatcacgccgctgcactccagcatgggcaacagagcgagactgtctcaaaataaaaaaaaaaaacgctcacctgcccagctccacaggtgcccgctcctaacactgcatgaggaccacctctcatccaatatgggcttcccacacgtctggagcctgacagctcagctttcagtttgggttaggatatctgcccttgtctctaaggaaaaattctaaatgtgttccaatacatctctggtagctttaacaaaagccacagagacacagcctggaagatgtctgatgtgcatttcctgccagtgtgctgtgtgactgcatctgatatacgagacacacgaggaaggtgaccgtctggactgaacaaggagactataaacataactgggtgaagagtctcccaccctgttgctaagcaggaaatagaaggcttctagaaactgcaggtgaatcagatttcttcagccgccgttggatactttctccgctccccaacccggtgtgcgggactcggaggttccaatgagctttaaaagtgctcttgttccaaagaatgagataaactgtaaaaataaaaatcaggctgggcgtggtggctcacacctgtagtcccagcactttgggaagccaaggtgggtggatcacctgaagtcaggagtttgagaccagcctgacaaacatagcgaaaccctgtctctactaaaaatacaaaaaattatccaggcgtggtggctcgtgcctataatcccagctactcgagaggctgaggcaggagaatcgcttgaacccgggaggtagaggctgcagtgagccgagattgcaccactacactccagcctgggcaacagagactgtgtctcaataaaaaaaaaagtaataaaataaaaatcaaccccaaatctgaaacacaaaaactcagtgtggccatcaggaagctcaggaaacgcccagtgaacatcagggagctcaggaaacactcagtaaacgcagagcccatggtcaccaggcccctcctgtgagctggcactgcataggcaaagcccagaggccttccctggagttttggtttgtttcggtatgacatgatgttcaatttctctaacctttaagcaataagtaaaaagtcccctgcggccaggtgtagtggctcaggcctgtaatcctagcactttgggaggctgagacgggaggattgcctgagctcaggagtttgagaccagcctgggcaacatggtgaaccccatctctactaaaatacaaaaaaaaaaaaaaaaaaaaaaaattagctggctatggcagcaagtgcctgtagtcccagctactcgggaggctgaggcagaagaaccgcttgaacccgggaggcagaggttgcagtgagccgagatcgtgccactgcactccagtctggtgacagagcaagactccgtctcaaagacaaaacaaaacaaaagccccctgcattgctgtgtggaaaacgtggtgatgccccccacagaataggagactaagcagagagtcactaaaggataaccacccatcgagtgtagaggctattcagatgttatagcacttagcaataagtgaaagacacaggactggccaggcgcggcggctcacacctgtaatcccagcactctgggaggccgaggcgggcggatcacgaggtcaggagatcgagaccatcctggctaacatggtgaaaccccgtctctactaaaaatacaaaaaattagccaggcgtggtggtggatgcctgtagtcccaactactggggaggctgagccaggagaatggcgtgaacctgggaggtggagcttgcagtgagccgagatcgcaccactgcaccccagcctgggtggcagagcgagactctgtctcaaaaaaaaaaaaaaaaaaaaaaaagagacaggactacaaggaaatggactgggtttttggaaggtaatttgaagctacaatgggatactgaaccattaagacagtggtagcactattgataaaagcttagaaaaggccacacacaaaaccttaggactcactcagcaagccaaaaaatgacacaatccacaaaccatgaagtccaagtacttaaaatgaagcaggaatcaaaatgatggtcagagaaggctggggaaaatgtaaaaactagaccaaaggaacttcaaagggctttgcttactatttaatgcaaaaagcacagcaggttaattttctatttcagggaaaatgtcttactctttgcagtctgagcttgttcttctctgtagagcctttgacgaatttcttagttatctgaaaacagaagacgtttatctttaaacacgggttatttcaattgcttcgagaaaaagagaaacctttccaggtgatcagtttttccaccaacagaaccaaaatgtcataatagggtcacaaactccagtaagtgtgcatacatgtgtgtatctgggattagataacaagagagactacggaggcagataaagaaatgagtgaaggacaccaagcacaagaaaaacaaggcaagctcagaaataaaggcaacagacaaggctgggcgcggtggctaacgcctgtaattccagcactttgggaggccgaggcagacagatcacctgaggtcaggagttcgagaccagcctggccaacgtggcaaaaccccatctctactaaaaatacaaaaattagccgagcgtggtggcaggtgcctgtaatcccacctactcaggaggctgaggcagaagaatcgcttgaacccaggagaaggaggttgcagtgagccgagattgcgccaccatactcctgcctgggcaacagggtgagactctgtcttaaaaaaaaaaaaaaaaaaaaagcgacagctggcctgggcgacagggagaggatggatttgtagcaaaggagagaggacctgcctgtccaaaggagatggagttcttacaggaatatagatccctatttgctggtccttccaatttctccaagagaagctgatattaggaatttcatatgaatttttttaggtgtttaaaaatggacacagacgggcacagtggctcatgcctgtaatcccagcactttgggaggtcaaggcgggaggatcacttgagcccaggagttcaagaccagcctgggcaataaagcaagaccctgtctctaaaaaaagcttttagttagtcgggtgttgtggtgcacatctgtagtcctagctacccaggagtctggggtgggaggagcccgggaggttgaggctgcactgagctgtccaacctgggtgacagagtgagactgtctaaaaaaaaaataaaaagatactaaattaatcaaataaaacatgtctccaggctggtttcctgtgcaccactaatttacattctgtctagctcaactctgctttttattttaatgttatttttgagatggagtcttactcctgtcacagaggctggagtgcagcgagtgccacgatctcggctcactgcaacctctacctcccaagttcaagcgattctcctgcctcagcttcttgagtagctgggattataggcgtgtgccaccacacctggctaatttttgtatttttagtggagataggggtttcatcatgttggccaggctggtctcgaactcctgacctcaggtgatccacccgcctcgcctcccaaagtgctaggaattcaggcgtgagccaccgcgcccagccaactctgctttttagaatgtggagtgaaagcttaagacaaaagggaaacttgctggggttttctaggacttctaccttctagggcacaatattttctatcacctaccttcaaactgagcatgagctactaggaattaccaataggatccatggtgtgactcaccatccacctaaatggtcccaggaaggaagacgaacagggagtctggactttggcctaagctatctcccaccggggcagggaatcctgaaaaccaaactagtagaagtgaagagcaatgggaagagacgcttaagagtgggaagaaatagttctccgggttcattgcagacttgcagtgtaagactgaagttgactgaaaaaccaaaggcccattttcctggcaatggtctgaggggtcaacaaaattatgtaagtgatttctttttttttttgagacggagtctcgctctgtcgcccaggctggagtgcagtggcgccatctcggatcactgcaagctccgcctcccgggttcaagcgattctcctgcctcagtctgcccagtagctgggactataggtgcccaccaccatgcctgggtaatttttttgtatttttagtagagatggggtttcaccatgttagccaggatggtctcgatctcctgacctcgtgatccgcccgcctcggcctcccaaagtgctgggattaaaggcgtgagccaccgcgcccggccaacagtgatttctttatctgggaaagctgaacccctgactaggacctctcacagaataaaagcttcagatgaatgagctcaagacagcctttccacctgggtcccactgagtcctttctggactaaacctttctttagggaaaggccgagccgttgtgagaaggctgcccgtgttggcaggagctctttcaccaccgagatcaggccagggtgttcagtctttgctgagaatgtggcaacagaaatgccagcccgaggcagcctcaccaaatgctgcagaaaaagcatctgtctctccagcatctactctgcctgccaaggctgtgtgcctctcccccacgctgagggatttaactgcagaatatgggagccgcagctctccggggctgccctttgtgttcagagattataatacggaatgtggtcttggggtggcggggaattcagttccttagtcttgcccatgcctgaagctcagctgcagaatctcctgcctcttacaatgccccccctctgctgtgagtccagagataacagacttgatgtgactggcaagagcccgctcagtaatatccaacaaccaaaacagagcaattactgcttaatttaaaactggtatcttttttgctttgccaaaccctcagatggaccttgaagtctgacagaactttatcttcttgaaatttgacccaagtgtttatagatctcactctcaaaattctatgcaacactcccacattctacccagctggagcccggtcagacagcaccctcaactgccaaaaacgtgatccaggatcccagaaggaagccaaaacacaaaaaccgacaatcccaaggagtcgcgacagagctcactatgtgtgggcatgaaaattcctgcaccctttctcagataatcctctcagagcctatggactctgattttatactaaagggtatctaatttctaagcccagaccagataagccgctaaaacctgacagcaggggagcggaggcaggggggaaaagagaaaacctccaattggcccaagcatgagagagtgcaagctgggaaaataagaacgcacgcattgccttgagctaccaagacctcattctccttaacagcccaaggccacttgtagaaggaagctcaagggaacaatcattttgtgaaagccaagcacagaaacagcagaactgagaaaacagctctgtaacctacagcatgtccacaccatgggatatcacgcagctgttaaaaagagctccatctttccatcccaatataaaaaacatctaagacacccttgagtaacaaagacagatatttacagtatatgtcatacacaaggaaacaaaatgatactgggtgtttcctagagatctctctggatatacaggacacagaaaaacacaaggtgatgatgatgataataatggcaacctcctgggagaacagagggcttcaaggtttccattctttttcctttttgtttttttttttttttgagacggtctggctgttgcccaggctggagcacagtggtgcaatcatgactcaccgcaacctctgcctccttggctcaagtgatccttccacctcagcctcccaaggagctgggactacaggtgtgcacccccatgccccgctattttttgtattttttgtacagacggagtttcaccatgttggtcaagctggtttcgaactcctaagctcaagcaatcctcccacctcggcttcccaaagtgctggggttacaggcttgagccactgcacctagaccagtatttcttttaaacatggagaatttattacaaatgtaatttcaagtatatggaaagaagttccagcaatctgggcacagaagcaagccaaagattccagtaacacaactgcaccaacatgatcatttgtcaaataatcatctcgatcactaacagaagaggctaaatcacaagtctgattgcaaacttcagaaatggttctttcccacatggtagaaaactctaatactaaaaaggaacacttcagctattcaaaggaccctgggagtatctaaagggggatctttttaaatcattgtttctccaaagtgagattctccagatcctgcagtactaaaacaacaacaaaaaccaaaacaaacaaaaacacgccatgaagctccctgcaaagggacagcaggacctgtatcggaacaaactcccattttcttttattttaaagaagaaataataaagaaggcaagccagcccacaaagtacagtggcaatgactgccctgggactctcaatgcatatttcactgtaccaactcaaggaagaacagaccccagtgacaagcacacagattacacggcagtgcgaaacaatctgcaagcttcccaccagctcgcccctgcaatctggaaagagctgctggtagggaggtaaagtgcaaaaacagtgtattccccagaggaacaggggttgtgggaagggggtggcttggacgtcacggcaaggaaaggtgttaagagttaggtaccaactggccaggcgcggtggctcacacctgtaatcccagcactttgggaggccgaggcgggcggatcacgaggtcaggagttcgagaccagcctgtccaacacggtgaaaccccatctccactaaaaatacaaaaattagctgggcctggtggcgcgtgcctgtaatcccagctacttgggaggttgagacaggagaattgcttgaacccaggaggcagcggttgcaggagccaagatcacgccattgcactccaacctgggcaaaagagtgagattccgcctcaaaaaaaataaaaaataaaaaagagttaggtaccaactatgaagcaagcaaaccaaccaaaccagaaatgcaggactccttaaaggttcggagataaagtaggggttggggatggagtctctctcagctgggatctcagggatccctgccatcagggcatgaggaggcctcccgataatcgcttccctcatagcttcggtgactgacaggccctctgcgggtggttgtggccgctttctgccataggctctgggccagcctgaagcctttaccacttgtaaattatctgaaaagttgggataatattgccttcaagtgcatcccaaaacctcgagtctgtgttcagaacaagatctagcgtcctaaatgcagggtttcctaaatgttgcacactgggttcatgtgctcagttgttttagaaagcgggcaggattgtgccaccatgatgcccaacgaggggacttcccagtttgcagactaagctgtggacatggaaacaaacttaatggaaacatgtgcttgtgtcctgtcctttttttttttcttgagacggagttttgttcttgttacccaggctggagtgcaatggcacgatctcaggccaccgcaacctctgcctcctgggttcaagcggttctcccgcctcagcctccggcgtagctgggattacaggcaagcgtcaccatacccagctaattttctgtatttttagtagagacggggtttctccataatggtcagcctggtcttgaactctcgaccttaggtgatccacccgcctcggcgtcccaaagtgctgggattgcaggtgtgagccaccgcgcccagccatgtgtcccgttcttgctaaatggctcacatcacaggacgaaattttgcaaagcggcagcagcctggaagaaattcaagtgatcgaatgtacactacaggatgcccaatggggagagacttcaactctgattttgggagattgagtggtggattaggtagaagctgaaatgtgtacatgccagtctggcacatttagtaacttagaagagggtactaggcttagtacctgagtgataaaataatctgtacaacaaacccccacgacaagagtttacctatataacaaaccagcacatataaaacaaagtagaagactggggcggtggctcatgcctgtaatcccagcactttgggaggccgaggcaagcggatcacctgaggtcagaagtttgaggccagcctggccaacatggtgaaacccgtctctactgaaaagatacaaaaattagccaggcgtggtggtgggcacctgtaatcccagctactcaagaggctgacgcaggaaaatcgcttgaacctagaaggtggaggctgcagtaggctgagaccatgccattgccctccagcctgggcgacagggtgagaccatgtctcaaaaaaaaaaaaaaaaaaaaagatttgcaccatttttacaacatttcataaacctaaagaggaagccattttttcctttttcatcttctcaggtgaaagacaagaaatgaagtcattcagaaaaataaatgctcttggccaagcacagtggctcacgcctataatcccagaaacttgggaggccaaggcgggtggattacctgaggtcaggagtttgaaatcagtctggccatcatggcaaaaccccgtctctactaaaaatacaaaaattagctgggcatggtggcgggtgcctctaatcccagctacttgagagggtgaggcaggagaattgcttgaacccaagaggcggaggttgcagtgagctgagatggcgccattgtactccagcctgggtgacagagcaagactctgtctcaaaaataaataaataaatggttccttagagctcaaaatcccgaaagcgaacaaggttggtggtttatggtccaggtggtctactgtacctgcttacaggtacagattaaatgacccatctcaggatctactactctcatataaagacccaacatgaacaaacaaaagtgctacaaaaccaaaaacataaaaaggcactgtctcttctggttctacatacttaagataaaaagtaaaaaattataaaatcaaaagacaccactaaacaccgtgggactcgtgactgattttatcagtttggtccctaagaccttaaggacaccattgtgctaataaaaaatcaataacagagacagaccatgcaaaagtcccccttatggggtccttaaaaatggttccagatggggtctcgctctgtcacccaggctggagcgcggcagtgtgatcatagctcgctgcggcctccaactcctcagctcaagtgatcctcctgcctcagtttcccaggtggctgggactacaggcatgtgccaccatgcctggataacttttaaaaatttttttgcagggctgggtgcagtggctcatgcctataattccagcactttgggaggccaagacgggcagattacttgaggtcagaaattcaagaccagcctggccaagatagtgaaaccctgtctctactaaaaatataaaaattagccaagtgtggtggtgcgcacctgtaatcccagctatcagggatgctgaggcaggagaatcgcttgaacctgggaggtggaggttgcagtgagccgagatcacgccactgaactccagcctgggtgatagagtgactctgtcaaaaaaaaaaaaaaaagtaattttttttcatagagatggtgtctatgttgcccaggttggttttgaagtgatcttcaagcgatcctcccacctcggcctctcaaagtgctgggatgacaggcatgagccactgtgcctggccccaggtaaggtttttaagatggctggctgtgctgaccctacagaattccccaagtcatgcttcctgccgtctcactgccacttcagtgctcagtgtctttgcagccccgtccctacatttctatgcttagacaggaagggcacagagaaagctggacctcgaatctgaagtgaggggttacagcaccagctcagatcctaattccctaaaacggctaagctatcactgattagatgtgaacaacgaaggcaaaacagcagggtgttattcacacagtacaccaggtacactgttgatgaattaagtcccaggggcatcacaacgaatgcagaactgaacactgtgagttttgataccaggaagaactccacgtcgagtcccaggacccagcccgtggccccgctcactctgccacaaaacacctgggtgacccagtggagactgacagcgctctgagatccgtgagcactgatgtgcagggactccatgggagatactcactctgcggaggggcgtggaggtggggaagggactggtactgctgtgctgctttgggggagcaggcggcccctcgggcgagctggtggaagagggagagctcagggacgaatggctgagtacagagtcttcttcggggaaagattccagcacctcactctcaggggtcatgttcttgccttggggtgtggctggaagggacttgatttgcggtggtctcacagccaagatgtcctgcaagaccaccataggcaccttccctttgaacaggatgcccccagcttcactccaactgtcctgctcctttctggggcacattctcgggccactcgtcagctccgggcagctccgtggcgaacattcctgggagtcgcctctcctccctgcacctccacagccaacaccctcctcctctgttttgcaaggaatgtctgaaagggtctctccaggaaatgccaacttgtcgttctgaatggccttcaacaacccctgctgatccccagtgtcttctcgctggccatttattgcctccctggagggagaggcttcagaatttagtttattgtggtccacaagactgtctggctgctcattcgagtcctctgtcaaatcaatgatgactgtgctctggccaatactggtttcgattctatttcttaaaaagttatctaagggacccttcccgttgacaagtttcggtctaaagtctatgtcagaacccacatgacagttgttttccaaggtgtccaaagaggcctctaaatcggggcttttactttgcacagaagtaccctgatcgtctgacatgtcatcggctttcccctttgggacaagattcaggcgcttaaacggcagacgggctgaaacaaagacagaaagccatctctagtgaacgtttaaagttacaaccactcatgagcttgaaaattactgatttgttgggacatgggggtgggagataattttaaagtttaaaaagggactatctgggccgggtgtggtggctcatgcctgtaatcccagcactttggggaggccgaggcaagcagatcacaaggtcaggagtttgagaccagccagaccaaaatggtgaaaccccgtcttttctaaaactacaaaaattagccaggccatggtggcacacgcctgtaataccagttactgaggaggctgaggtaggagaatcgcttgaacctgggaggcagaggttgaagtgagctgagatcccaacactgcactgtagcctgggcgacagagacagactccctctcaaaaaaaaaaaaaaaaaaaaaaaaaaaaaaggccgggtgcgggaggccaaggcaggcggatcacaaggtcaggagatcgagaccatcctggctaacacggtgaaaccccgtctctactaaaagtacaaaaaattagccgggtgaggtggcgggcgcctgcattcccagctactcgggagactgaggcaggagaatggtgtgaacccggggggcggagcctgcagtgagctgagatcacgccactgcactccagcctgggcgacctgagcgaaactctcaaaagaaaaaaaaaaaaaaaagacggggcaggggctatctgaagccaggtacactgacttacatctataatcccagcacttcgggaggctgaggcaggaggatcgcttgagcccaggaggtagaggctgcagtgagctgtggtggtgcaactactctgcagcctgggcaaaagggacctcgtctcaaaaaaaaagagggggtggggggtgctatcttttcattctatccttttctaacatcctaattttacttatttttttttcttttggagacagtcttgctcgtcacccatgttggagtgcaatggcgccacctcagctcactgcaacctccacctcctgggttcaagctattctcctgcctcagcttctcaagtagctgggattacaggcatgcactactacacccagctaatttttgtatttttagtagagacagggtttcgccatgttggccaggctggtctcaaactcctgacctcaggtgatctgcccgcctccacctcccaaggtgctgggactacagatgtgagtcaccatgccccgcttcaacatcctaacttaaaaaacaaaatcctgacaagccttttagcagagccatcgccagaatttcaagagacatttgtttatttcagatgcagttcatattccaaatttatttttaatgggtgaaaatctcatttgataataactgcatctggttctcaagtagaaaatatagacacatttgtggacagggttttttttttttctcctggcctcagcaccctaggctctgttaggcttttctcatcaatcaaactgttctcccagagtctgccaggcttcgggctggttaggaggaacacagaaacactttggagagtgaatttcccaaagaacctatgttcacttacttcaatgccattgcatcttttattaactatttcatcatgtaatagaccaaataaaaacctgtttttttttggggggggtgtggggggagttgtttgttttgagacagagtcttgctctgtcaccaggctggagtgcagtggcgcacccttggctcactgcaacctcttccttccgggttcaaacaattctcttgcctcggcctcctgagtagctgggactacaggtgccccctaccatgcccagctattttgtattttagtagagacggggtttcaccatgttggccaggctggtttcaaactcctgagctcagacaatccgcccaccttagcttcccaaagtgctaggattacaggtgtgagcctagcatctggcgtccccctttttttcaagagacagagtcttcctctgtcatccaggctgaagagcagtggtgtcattataattcaccgcagccttgaactcctggactcaagcactcctcccaccccagcctctcaaatagctggttttacaggtatgcaacactgcacccagcccaagtttgaaaaacccaaaactgtagtttctaaaaatacaatctgggccgggtgcggtggctcacacctgtaatcccagcactttgaaaggctgaggcagggggatcacaaggtcaggagatcgagaccatcccggccaacatggtaaaaccccatctctactaaaaatagaaaaattagctgggtgtggtggcacgcgcctgtaatcccagctacttgggaggctgaaggaggagaattgcttgaacccaggaggcggaggttgcagtgagcagagatcgcaccactgcactccagcctgggcaacagaatgagactccgtctcaaaaaaaaaaaaaaaaaaattacaatccaaccgctcatctggcccaagggtgaacacactccccgttttatgcagaaggatttgggagcatttatcttccaggacaacagtggttctctgagggggcagttctacctcccaggggacatcagccacgtatagagatatttttggttgttacgacttggaggatgcacttactggcatccggtgggaagaggccagggatgctgctacgctccctacaacatacaggagagctcccagctgcaagttacaaaacaccaatcgtgcataagtggaggcctcggggtttacttgtgggaaccccacgagacattactgtgtgaaaagcattttcccagcttcctggtctgaagaaggactgtttctctcccctctagctccaggcttccactgaggtctccaacaagagacaaggaagactataaactacgaacaactctttaacccatttccaaataattaccttgtattaacttcttaactggaaaagctggtctatctttgcaatccatggctgcaaataaaagtgtcaaagggtaaactgttaaattctgcaaataatcaagttagcaaatacatatgtagagccaattatgtacaaggtggaggcaattctgacccctctgtcctcgggggccatttgacacagtctagagatgtttttggttgtcatgatgcagggagggctcaaagggatgctattcacatccagtgggtagaggccagggattctgctaaatgtcccacaatgcaatgcacagcacaccacaatgaagaattatatgggccaaaaaaaaaaaattttttttttttttttggagacagagtctcactctgtcgcccaggctggagtgcaatggcacagtctcagctcactgcaacctccgcctcctgggttcaagcgattctcctgcctcactctctcaagtagctgggactacaggcgcatgccaccactctcggctaatttttgtatttttagcagagacggggtttcaccatgttagccagaatggtctcgaactcctgacctcgtgatccacccgcctcagcctcccaaagtgctggccacggcgcttggcctcaaaatgttaataggttgagaaatcctaccctagacactgtcatgtcttgttttattttctttgtggcatttaatctgaaactttcgtgtttattacgtctctctggaaacaaaatgccaactctatgacagcagaaagacttgttccatgctgcacctatggtacctggttagggtctggaataaatcagaaagccaactaagagagtaaccggaactgtttcatgaaatgaaagtggaatgagtaaaagtagggaggagagaaaacatcagattacctatttcattcccatgatccccaaacatcttcctccaacccaagcccccataccaccaccaaatctgtaaaatcagaaaagggatccttttctttttaaagagaattcatgaaggtaccacaatttaaagcactttgagcttgccaggcaggagctgaagtgctgtcaagagaagataagacaaaatattttcctgcaaaaaaaatctcaagaaaccatctaataatatcaaagcagatgcagcagtgatcataaatagaagcgagtctttagataaataccttaaacagagtaagtttaggaagctcacacttaccaggagatctggcttggcaaaacctagtttagttattttggttaatctacgtatgttttgtaagcattacataaaagtgagtactttttaaaagcagactggggcttcctaaaaaactccatcgtccatacatgaaaccacccctcacccaccgccccaagcttagtgaataagaaaaggtactgagaaaattcatgtttcctttctagccacttcaaagaaataaagacagtatcattctcaagtgtccacttaccaaaagccatggatttctaccccctaactgaaggatatgatttttagtcacttaactttattttcgagacaatcacaaaaatctatttgtgtggctttgagtcactagctttggtgcaagtggaacagaaacaacctcattaaaaacaggacccaccctcattaaaaaatcttgtatataaaacgggacactcccaatccagagatccaaagatacacacgattaacacatatgtgtgtataaagttactaactgctctttattctgcgattacatcctttctaattttatttggcactaaaatatactttcctttcatgatagcatggtcctagcgagtagcgatttttttttttaaagttaaatatcctggccaggcatggtggctcatgcctgtaatcccagcattttgggaggccaatgcaggtggattacctgaggtcagaagttcgagaccagcctgcccaacatggtgaaaccccgtctctactaaaaaatacaaaaattagccaggcatggtggtgcaggcctgtaatcccagctacttgggaggctgaggcagaagaatcgcttgaaccagagaggcagaggttgggcaacagagcaagactcagtctcaaaataaataaataaataaagttaaacatcctgacttaaaacatcacagctccacgacagtaccaactttatattaattttatgtctccgggaaatcccacaggctagaaggaactacagccatgattttcagccaaggcggaatctgccccataggggacacagggcaatggtatttctggctgttactaaggcatggtgagaggggctgctactggcctgcaaaaggcggaggccagggatgatgcttaacaccctgcagtgccgtgcccaggacggcaacaaatatcaacactgctgaggctgagaaactggactggcgtccattctagcccttcattcgttcacgttatttactgagcacctactatgtgccaaagcgtaatgccaagtgctgccaaagcgttatgtaatgcagagtccagcaagggagagggacagtctggtcttccttggttcaccctcccacgtttcaggaggcctgtggtgggctccaaagaccccattccaaggcacacggaggaggaagtcacggtgcatatcaggaaggagcaagaactcgggagtcccaccctcctggccatctctaccatctgggcctcttcttacccgggcttaccccgaccctcagcggcatcggtactggtccccgagcccgtgcgaccttgggcctcagtttccccacccgctgcaaggtccaacatggtcaagggacacaaacgcatccagtaacctgcagggcaagccctttcgcttccctgggcctcagtttcccctctcggcccctccgacccaccgccccagagagtcctggagggacgaactgacgcaaaagcgccggaaacaaacaatatggtcgcggctacaacaataacgtcaacaagggtgcccttggggacgccaggccctcgctggggatgagaaggccccagggggtgaacgcccggcccgcaggaccaggcttggcgcccggaggcccgtccgcctcccatcgccgcctcggcccgtccaggccgcgcgccgcgcccccccttcccctcggcgcgggcccgaaccgacctgtggcggctcccctggcgccgggcgccccgcactccagctcctccagcatcgccccggcggcagctcgacctcctctcaggcggcggaggcgcgggctcccctcaggcggccgctgctcttcgccctcccgcccgcgccgcgtgctgccgccgcggccgccgcgctcgtatttggcgggaaccgcggcgacccccgcagtccgcgcgccaattgggcgagcccgggtcacgtgacggcccgcctcgggaattgaggggcgccgggggcatcctcgcgagatccgtgacttccattcctcccagggctcgcccattgacatatccgcgagggactgggcttcccctcggaggcctgtcattggctgggaggagctgccctgcgattggaggaaggaggtgtcaagctcattgctctgcgctgcgactggctgatcgcgtgggatagtccctaagaggagggaggcccaggctcttacgtcaccagaacattttacgcaaggcgcagatgacaacttgaaagtgggatttagatgaggaacctggagttttgagtttatcctaatgggacatcggctaaatatagcaacagcaattaaaattataaattgctttctacaagaacaataaaacgaagtctggggagcgcttcggaagtatttgacattcagtaaataacatgtagaatgagtgaacgaaatggacgaaatggatcgtttctggtttaatcctcaggaaattggcacatgctgttttctctgcctagaacaatcttttcgcagctcttttcctggctaatttatacttttcagatcttagatcgtcaccccaggaagccttttcttccccaaccctgacaatatcaagtgcctacaacactgttcttttccttaaagcaattacagctgtgtctatttattagtttgttatttgactaatgaattaatttctgccttttgtcattagttctggcgagggtaggactcattcctcactggaaccccaggacctgttagtaactgatcatatttaccaggtcaataaatgtttgagtgaatgtataaatatttgattgaactgtgtagatcaagcagattaaaagcctcacacaaaacagagaacttcagtgtcagcctgtgagtgtagaaacaggttttctttctttctttcttccttccttccttccttccttccttccttccttcctttctttctttcttttttcttgagacggagtccctagtagctgggaccacaggcgcccgccaccacgtccggctaattttttctattttttagtagagacagggtttcaccgtgttagccaggatggtctcaatctcctgacctcgtgatccgcccacctaggcctcccaaagtgctgggattacaggcgtgagccaccgcccctggccctgaattgcattctagaagcatctttctggctgccatgacaaggaagaattggaggggaggactggtggaaagtatggtcaaggcatgaagacagacctagatgtctagatgtgtcacgtgggcaactgaatggatgaacacaggacagagagagagaggaagagaggtggccgggcacggtggctcatacctgtgagaccagtactttgggaggctggatttggtgggggggttgggggttggatcacctgaggtcaggagttcgagaccagcctggccaacatggcgaaacactgtctctactaaaaatacaaaaattagcctagcatggtggtgcgcgcctgtaatctcagctacttgggaggctgaggcaggagaatcgcttgaacccgggaggcggaggttgcagtgagccgagatcacgccactgcactccagcctgggagacaaagcaagactccgtctcaaaaaaaaaataaataaataaataaaaatgggagggggctgaacacttagacgaactggatttagctaagatgagtaaacaggaatctgaagaatcgtaagcaggggccccttctacttcccaacctccctggccaggtttaaactaagcgcgttttccaagacgttagggtcacctccacgactccagggggcgctgcaactgctacggcccctctaggctcgccccgctcaactcactgacagaggcggcctctcccgcggtagacaatgtgcacgtgcgctcttcagccggcagagggcgcgcgtgcgcagacggggccgggggcgcgcgcgggggccgggggcgcgcgcgggggccggcaccggaagcgtgcggttgccatgtaatatcctggccgcgcgggcgcgcgagcggctgaggcggcgccggggcgggcgcggagctggcaagcgggtggcggaggcggcgccgacggggactgctgaggcgcgcagagggtcggcggcgcccgggagcctgtcgctggcgcggtccgggcgggaggctcggcggcgggcggcagcatgtcggtggcggggctgaagaagcagttctacaaggcgagccaggtgagcgcaggcccaggcgggagccgagtaccgggccccgggctgcccggatgagggagccaggcccgacctggcccgggagggggccggggggaccgaggtggggacgttggcgcgtgtcccctgccaggtgggaagaccaagggacggacgggggcgacgaggtggcccaggccctgcccgccatgcgggctccagaagcggggacagagcccctgggaggaggggagaggcaccctgggctgcccagggacgcggacctctcccctccttctctccgctgcaaaggcggggtgcggggagagaaggggaagagaggagtcccgaggctgtcgacacaggactcttgccagataacccagagccagggaaaagttgcgtctagagcagttacgttcaaaatcctctggatgggcaaggtacaaagttgaaaaggtagaggaagaagtcagtttcccctctctgctcctcgggcagccagcccttctccccagagacaagcgactgtcatcgactccgtatgtccctttcctaagatacgtgtgtgcctttcctttaaaaacacgtaccctgtgatagcatatgccacagaatcctgtgtgctgtgtttttcattgcttggagatcacactggagcgggatttctccccctccgtcggcactgttgacatctggggctggattgttctccgtggtggggccgtcctgggcactgcggggtgctgagcagcgcccctggcctccacccactccgggccaggagcacccccaagtcgtgacaaccaaaaatatcttgagacatcaccgtgtgtccccttagaatcagtcctccttccctcccttcgttccttccttccttctttccttccttcctccctccctccttgcctctctccctccctcccttctcttctttccttcctcccttcctttcctgtcccccaggactactgctctagaccatactccacacttcttggatttttttttttttttttttttttgagagggagtcatgctctgtcgccccagctggagggcagtggtgcaatctcggctcactgcaagctccgcctcctgtgttcaagcaattctcctgcctcagcctccccagtagctgggactacaggcatgcgccaccacgcccggctactttttgtaattttagcagagacagggtttctccatgtgccccagggtggtctcgaactcctggcctcaagtaatccgcctgcttcggcttcccaacatgctgggattatcgacgtaagccacctgcctggcctacttggctctttttaatgggtacattgtatttcattccatgacatataccataatttatttaaccagttgtcagttgatagatatctctattgtttaccggaattttctgttaccattactacaataaatagccagtgaatatctttgctcaccagtgggattagttttataggatgaattcccagaagtagaatgctgcatcccagcctaagtgcatttgatatggacagataaagggttttttttggaaactccagggcccactgctcatgaatctggtgaaagctgtggatccactctccagaaaactgggcacatttaaaattttcactttgcaatttcgaatgcaagaagcctcaaatttggccgggcgcggtggctcatgcctggaatcccagcagtttgggaggccgaggcgggcggatcacttgaagccaggagtttgagagcagcctgggcaacatggcaaaaccccatctctactaacaatacaaaaattttgtatttttgcctgtaaccccagctactaaggagggtgagacaggagaatctcttgaatccggcaggcagaggttgcagtgagccgagattgcaccactgcactccagcctgggtgacagagcgagactccgtcttgaaaaaaaaaaaaagacaagaagcctcagattgttgaatcctattggtccgtgtactgcagggtgaggttgtgtggaatttgtgtagatagagtccaccgaggaatgagcaatgatcttagcaaatgcttgggccaaggtggcaaacagggttctctgcccacagttcggagatgcccagtgggagcaaagagaaacgagtccccagtaacacccagcaggtacctttgcccctggaaagaaaaaagtaaggaccctgccaggtgctgtggctcatgcctgtaatcccagcactttgaaggctgaggcaggggttcccttgagttcaggagttcaagaccagcctgggcgatatagggagatcccatctctacaaaatatgaaaaagttagccaggtgtggtgatgtgcacctgcagtcccagctacttgggaggctgaggcaggaggaccacttgagcccagcagttcaaggctgcagtgaactatgatcgtgccactgcacttcagcctgggcagcaaagtgagaccctgtctcaaaaaataaataaaaaaagtaacaaccctagtggttgtttagggatatagatacttagggtctatctctacaccccagatgatggttaaaccctggagaaagatttaatccagacgaattttagagttgtcactgagaacagtcccacccccttgccccagcactttgaaatcagatggcctggccctgggttagaccttgcccagcaggcgtcagaccttcacctgcttggttagagcaccatagagtactgctccctagcaggaaagatgtcctcagaggtcttggaggaattcctgggccactttgttccctgctatagacaggtctctggaagccaccacccccactcccagcgatcagggcctgtgcccatattgtcctgagctgacaccctctttagaggaatgaaccaggcctcttgtgccggccaccaggactttgtctctctcaagggaagcaggatgacctgcgttcagatctgtgaatggcgccttgaagcctggaaaggacagtgtggtgttagctgggcttaggattgcctatttccacatcccgaggcctagtcccaaagcacaatggccacagcccaccctcggggctgtcgtcttggcctcctggtcaattctgtcctgagtcgtgctcttagaagtcaccctggctgcgttccatgctcttctgtgatcattgccatggttccctctgacatctcagctgttatctggacgtatccgactatttgtgtctctttttttgtttttagtctaataacaactctttcaccctctgctgtgcctgttggaaagtgacatctctcgggatctctcattacgtagtgatacaaacatttattgagttctcaccatgtgagcaggcagtatgctttataccagtaggtctcagctggtcttgcttatccggtctaagggtaaaaaacattcccccttttacacaaaaggattaggggacatttatcttcctgtaaaacagggccagttctgtcctccaggggacattgacaatgtctgggacctttttggttgtcacagcttggtgcggtgctgctggctactagtaggtagacgatattgctggacatcctccggtgcccagggcagcatctccccactgcccccaagaattacctggccccaaatgtcaatagtaccaaaatttgagaaaccctgcttgaagatttggaaaaaaaatgaggataattataccaaaacaaaggaacaaaaaaatccccactgagccattcttacgattttcctagtttggccaggtgtggtggctcacgcctttaatcccagcagtttgggaagcactccagcctggtggatgagagcgagacttcgtctcaaaaaaaaaaaaagtaaaatataaaataaaacaaagattttcctagtttgctaaacacagatagccacatgtgtagtttgtttttgtttgtttgtttgtttttgagacggagcttctctcttgttgcccaggctggagtacaatggcacgatctcggctcactgcaacctccgcctcctctgttcaagcaattctcctgcctcagcctcccgagtagctgcgattacaggcacccaccaccatgccccgctaatttttttgtatttttagtagagacggggtttcaccatgttggccaggctggtctcgaactcttgacctcgggtgatctacctgcctcagtctcccaaagtgctgagattacaggcatgagccatggcaccccgccccacaggtagatatttacataaaactcagcatccagaccctaaggtcgagcccaccctcaagtctttaggaaaattcgagtgtctttcagtatctgggcttcttttttaggggggagctagatccaccataaacattttatgtgtatatgtacaccgtttatcatatacatattgtgacaactgtatatatatatatatattttgagacagagtcttgctctgtcacccaggctggagtgcagtggcgcaatcttggcttactgagaccaacctccgcctcccgggttcaagcgattctcttgcctcagcctcctgagtagctgggattacaggtgcgccaccacacccggctaattttttttgtatttttagtagagacagggtttcaccatgttggtcaggctggtgttgaactcctgacctcatgatctgcccgcctcagcctcccaaagtgctgggattacaggtgtgagccaccgtgcctggcctaaacaacttgtatgtatacatacactgtttatcatatatacgtattgtggcaaccatatgtatgaataagccttcaaaaggtgagcacctgtatttcctggtaattgacaatgtcagttttgtgtgatgtagtctctatggaatttcccgtacatatgatgacagaaacaaagactgaaacatggttcacagagaaacacagaacatacatgactctcagaataaccatgtctgctgctgtgtagggaactctttgagaggaaacactttcactgctggcctcaaatgccactatccacttaggttcttcagtgtgaacctttaattcaaaagtaccttccagctgatcacgaggaacctttatcgcttgcacctgaggaggtcagggctgcagggagccctgattgtagcactgcactccagcctgggagacagagccagaccctgtctccaaaaaaaaacaccatttacagtgacttagaaaagggacagtttccagtgctacacacaatggttccatacacagcttaaaggtttccagttctttgctggaacttgatttaatagttgagagccacaggcatcggggctcctgaaggaggggcacgcgcccatcagcgctgtcagccggggatggcgcagaccccttccttggcttggcaatgtcggagacagttgttatcgcaactttgggagagaatgctcatggcatcgaggggataggggccagggatggttgccaagcatcctacaatgcataggacagcttccccccgctgcaaaggaagaattctccagccctacgtcagtagagttgagcttaagaaaccctgctttaaaccaggctctagacttccaagggttcttacggtgtcctttctaaattgatcaacagaggccgggaggatgcgggagagagtgctggaaaagataaacttactttctaacaggcgaggctgtgttgttggttctgagtttctgatctctcgttggtgataatggtaagaaccttagtgggttccaggctagttcatctccctgcaaaaccttttgggaacttgttcaaaattggtttgggcttgagtgggcagtttgtgagtttttacttcttgtcatgaactggccatagactggttgagggcctgagctggggaaagttgaatcatctggaagaaagcagtaaaaagccgtccgtcatggtcccatctccctggttccctcctttctgcctgtgtgacacccactccctcaagagcctcctggcatccgtgcgcagctagaactgggggactaaggagggtgaaagaatgccgctagcgagagctgctctcagaagttcccttggtgtgctgggggtttgggtgacattatttccaggcttaagctgctaactggcttcctgataaatcttgtggccgggctgtgtgagattgagagtgtaactaggggtagagctggcagctgcctggaatgctggcttttttttttttttttttttgcctgaaaggagggagagggtttgaacatttgaatggaaagattgcttcagactgagctaggagggacattcacaagcgtcacctcccatagctttgaaatctgcctgatgctccttaggccctgggtttgtgcctaggagaaaaggagaggccaggggggttgggggaggactgtctgccgggggatcctgggccccacctatttgggggctgtaggtcagagtaagcagtgtctgggacatggctggtgtttcagaatgtcaacgatactgcttgttctgacctatttttatttttatttatttttaaattttaatattaattttttgtttgtttgagacagagtctagctctgtcgcccaggctggagtgcagtggcgcgatctctgctcactgcaacctctgcctcccgggttcaagcaattcttctgcctcagcctcctgagtagctgggattacaggcacataccaccacgcccagctcatttttgtatttttagtagagacggggtttcacatgttggtcaggctggtttcgaactcctgacctcgtgatccacctgccttggcctcccaaagtgctgggattacaggagtgagccactgtgcctcgcctatttttatttattttttaatttttttgtagagactgagtctcactatgttgcctaggctggaggctccttaaaccccaccactccaggtcttgaactcctggactcaagtgatcttgtctcctcattctctcaaagtgctgggattacaggcgtgagcctctgtgcttggccctgacctttttttagtttatttatgatggtgtttttttttgtttgtttgttttgttatttttgttttttttgtttttgagacggagtctcacaccattgcccaggctggaatgcagtggcgcaatctcacctcactgcaacctccgcctcctgggttcaagcaattctcctgcctcagcctcccaagtagctgggattacaggcatgtgccaccacgcccagctgatttttgtatctttagtagagatgaggttttgctgtgttgaccaggctggtctcgaactcctgacctcaggtggtgatcctcctgcctcagcctctcaaagggctgggattgcaggtgtgagctaccacgcccgggttgttatgattttttaaaattttacgtatttgagatgcagtcttgttctgtccccactcccaaggtggtgtgcagtggcacgatcttgtctcactgcaacctctgctgcccagttcaagcgattctcctgccccagcctcctgagtagctgggattacaggtgcctgccaccatgcccagctaatttttgtatttttagtagaaacggggtttcgccttgttggccaggctggttttgaactcctcaggtgatccgcccgccttggcctcccattgtgctgggattacaggcctgagccacgtgcccggccctgacctcttttttaaaacctcactttgtggggccactcttggttttcctaccaaagtgcttgacttgttaagccataaacatggaatgatcttttgtgtgtgtgtgtgtgtgtgtgtgtgtgtgtgtgtgtgtgtgtgtgtgtgtgacggagtcttgctctgtcccaggctggagtgcagcgggccgatctcaggtcactgcaacctccgcttcctgggtccaagtaattctcctgcctcagcctcctgagtagctgggaatacaggcgtgcgccaccacagctggccaatttttgtatttttagtggacacagggtttcatcatgttggccaggctgttgttgaactcctgacctagtgatctccctgccttgcctcccaaagtgctgggattacaggcgtgagccagtgggaataatcttaagatacaaaaatatggggttcataaccccttcaccttggcacagataaaagtgtatacccttgtgctgggagtgacaggtagttgagaggcacttttgtgtgggctggtaagggccggcgttggtgattcagaggctgtgcccgggacaaggccggtgagtccagcagctgcaggctgacctccggaagccccctctccctcggggaggtgttggcaacagatgtaggaagggactttgctttgtgatgtccacgtatgatgggaatggagttaagtccgttcttgcaggaagctctggtgactgaatccaggaacgtgcggcatgtactggtgtgtgccttgaggcattggagccggcattggagccggcggcgtggaccctgggccaccccaggacaggcagggctcactctgtttctggcttgcagacgggtggaaccagcagctgtgtggaggcctgaactgtgtgccagctgggctgtgcagacacagaagtttgagactgcctttccccaaaggaagctagaggctccttacaccccacggctccccgggcctgtctgtgaaacctggctcacctggcccccttcacagggttggctgttggtggtcactgggcactttgtaaccaagcagcatcctacgttttcccattcttaacaaaccaggaccaaggggtcatcagactccgatttctgccacccgtgactgctgtacagtaggtcccagaacaagtcaagggctgaaagttcggctaaaagtttgtctctgactcagaatcccgtgttcaccaaagaccagttggggctccgtgggtgctgatcgccctgcttatctgggtgtgtgttaaagcccagctctgcagtacttaattatattccaggtgcccctaataacagcctgtgagtgcgagatgaggtgtctcaccttatgccgctcagttgaagaaattgggggctgtcacattttgacaccccagacctatcaagcacacagagaacatgacactgctcaccccacccctggccacccaggggtggccgctgtcacgtgcgcagtgcacctgaggtctgagctggcagctgggcccctcagatgtctgtgtgtgtgtctgttgcattttttcctcaaaggagaaacctgcaggttgaggcccgtcccgctcagacctgcctgtgtctctgtgtccagtggactttaatccaggggcctagggtacagccaagccttcactgctgccttagcccttttcctcctccgtgattgtttccagtgttttgcaactgatctgatctggggaaacgtcgtgtttaatttggagcatgctgccaacgtccccagtaggatttcggaggcagccgcaggtttcggcgctgcccggggcagagcttagaggagaagctcagagcggcctccatgtttctcttttccaagcccctgaggtctttaagtgccgggagggttggaaggggaagcattgccccggggtgggggtggggtaggtgtcaggagctcaacaggctctggaggcatctcagcaggacctgagctctccaactctaatggctttttaatgtgtgagctgaagtgtcagggggcggtctcttctggttctttttcgaagctgtccctggaaagcggatgaaagaatgtggtggccagggctgcagcgggtttccctctctcccttctctcccctcctctccctatctctcccccctcttcttcctctctttctgttctcactcttcccttgtctttctctctgtctctcccttcttttgccctctcacctcttcttcctctctctctgtctgtcctctccacaccttcttcctgtctgtctgcctgcctgtctctctctttctctatctctcgccttttgcagggctggatttggcaagcacttttcctgagcactgcagcttggtgcgtttctgctcatttcctgttaagcagtacccagggctccctgaactcaggctctgggaggacggccctgtcttccttttcctctccactcctagaaaaacctgctgaccaggccctgagagcagggtcacggggagacctcctcaccacagcaggaagatagacggacagtttcctccattggacctgactcagcagcggcccactgaccgcctgggagggggctcccgcctagcgggccgcagttccacacctgggtaaggggacgaagcacccagcaggggtcatgccgcgtgtgacacagtctgtaggggcggtggtcatggcagatactcagaatccagatggcatcaggcctgcgagggcatggggtgagtgggcccactcccctccctgggccgggaacatgcgtctcctctgccctggcccccaagtggacagctccccacatggtttcatgccaatgggagtgattattccattgccgttgccactggaatatgagcccattgccgccggagccaggcatttgtgctcattgctgcatccccagtgtttggtttactggctggcctgccccagggagccggtaaatatcacatggaaggacggatgggccaccgtggcccccaccctacagcggatggcctcgtgtcgagtttgtgtgagcacgccctagaggaagagaagcaggtctccacctggcccagggtacagttcaagctctcagccgaatttcgggagcttctggagcccctgccttggtcccaggtttaaatgctactcttcccctgcatgggaactcacacagtcagtccctcccgcccaccctgtgtggggccctgtactctcctgcctcctgtccatgtcaccggcctctcctacctcccaacctcattttctctccacttcctgtctgccctataacgaacgcgtttctatctccccttatccttggcatcttccggggatgcatgtgggaactgagttctcagcccttggagcttctggcctcggggtcccccacccagatgccacacgctggtgttcgtgtgaggtgctctcctcccatcggacggcagctcctgaggctgggctgtgctcgggcatgtgtgatgggccatgttctgctgggcactggcctgctgatgaggttgccagagacgccccctacagaggctgagctagagggctccttctcagagtgaggggctgtcctccacagggcccctgtggtgtccctggtggtggctcaacagcagcccctggtccgctggccaggcatctgaccaggccgtgtcacagcaccagggaggcaggtggctgacaaggcctcggagaactcggttgggaacaggtccgactgctctgaaaaaatcaacagctcagagagtgtctcctgtggtttagggtgtgtgtccagctccagggctgcagctgacagtcacctgaacttggccaggtccgagggcctgactgtgtcacaggcagtctctgacccagagcctgcctgagcagggtccctaagaagccaagcccagacgcctgcttccccccttgatcgaggccaggctgaaatgcacctgctgctgcccggctgggccggtctgctcagagttggtggttccctggcttgaatgcttccccaaactaaaccactcccagcctccagaaactggctccccagccctgtttgccaagattcttaggacttttgccatggctgggcctggccacccatcctgcagctctctccctggcctctgtgcccagttgctgcagtgacttctctctgattgccacaataggccctgcggctcctcccacttctccctgtggatggccccttctgtctctgagcctgctgtctcctgtgcttccgctgcccctctctgtacctgtcttctaagcctgcgtcccctgtcccagcgttcaaatgtgacactcccacgactcgcagaccacagcaggcagctggccagcggtgatgccctgaaatgacagccagggttcatcgcctgtccttcagcttgaacccattagctgattcggcctctttcctcttaaattacttttattttatcacttttaaaatgtattttaaaggggatcgtggtatttttccttgctcaataacagtaactggaataggccggacacgatggctcacacctgtaatcccagcactttgggaggccgaggcaggtggatcacaaggtcaggagtttgagactagactggccaacatggtgaaaccccatctctactaaaaatacaaaaattagctgggcgtgggtggcgcatggctgtaatcccagctactcaggaggctgaggcgggagaatcgcttgaactcaggaggcagaggttgcagtgagctgagatcgcgccagtgcactccagcctggcgacagagcgagactctgtctcaaaaaaacaaaaacaaaaacaaacaaaattcgtcgggcgtagtaatgcatatctgtaatccccgctactcgggaggctgaggcaggcgaatcgctggaacctgcgaggtgaaggttgccttgagccaagatagcaccactgcactctgcctcaaaaacaaaacaacacaaaaaaccccgcacagtaagtggaataacaaatacaacagcagcaaaacaatagagtgaaattttgctggataccccacccctgagcctgaggtgtgctctcttgtgaaagagctgttcgggctggacgtggtgattcttgcctgtaatcccagcacttagggaggctgaggcaggattgctttagcccagttgttcaagcccatttgggcaacacaatgaaaccccgtctgtacaaaaaattaaattagccagtcatagcggtgcacacctgtagcccagctacttggtaggctgaggtgggaggatcacttaagtccaggagtttgaggctgcggtgagctatcatcatgccgctgccctccagcctgggcaacagagcaagaccctgcctaaaaaaaacaaaaacaaagcctgtactatagtagtgcccacctggaagttccttcttgccagaataagaaatacagaagaggggccaggcgcggtggctcatgcctgtaatcccagcactttgggagggcgaggcgggcagatcacgaggtcaggagatcgagaccatcctggctaacacggtgaaaccgtgtctctgctaaaaatacaaagaattaactggatgtggtggcgggcacctgtagtcccagctactcgggaggctgagccaggagtatggcgtgaacccgggaggcagagcttgcagtgagccaagattgcaccactgcactccagcctgggcgacagagcaagactccatctcaaaagaaaaagaaaaagaaatacagaaggggaattgcagcggagttgtgttctgaccacgtgattcacgtgccttatgcttgtgttagctgccacgctgtgggaaatgcctcacggaaggcacgttgccttttcccttggggcccaccgccatgccctctgcagtctcgcctcttaggatcgggggatcctgcacactgggatttgggctcaggaaagagggctgatgggttggtaacagccaggtcctgagtgcctggggaaaggcatggaagctggagacccagcagtcagcattcttaaggagttcccaaacattgttgggcacggtggctcgtgcctgtaatcccagctctgagggaggcagaggcaggaggagcgcttgagcccgggagtttgagatctgcctgggcagtatagcaagaccctgttctccaaaaaaaaaaaaaaaaaagtgaaaaagaaataaaaaaaaaaaagagttcccaaacatcacccaagcagtaatgcaaatatcttcctccaggacacccccatccagccctgcgtgctggaagcagaactgctgactgattatttttctgctgtcatttcgggactttgccccagcactaagcagagacccttattctcaggaagccccctgcggaaggaagctctgggaactttctgcccgccctcgccgcaatcccttgccacccgcctctgtgggatgaggccccacagctgactcaggcaggcatccatcagcctaacagcctcactcatcagagtcccgattgtttgaaacagatgggcagccctggcccttcaaggccagcctttgtggctcagaagagggcagcccagggacctggttggaatttccccatctcccaaccttcacccaccctggcataagatcatcttcatcctctcctgaggcctctgatggttttctctaaggttgagaatccctgctattattttaggaaggaaggacaacccccagaactgcagagtatcttgcttcttgctgactctggtcaagtcagcgttccacccacgaggagccttggagctgtcggacccctggctgagcgtagtgtgggtgtctgggaggtatgtgctgcccactgcagaggctggctcggaggccgctggaatgctgcgctgtgccctagcttttacatttttatttcatacttgcagaatcctgtgtatttttccagtgttctcccactcccagccttcccacagcagcctccccggctagccccagagcactctgtgcctgtcagaagaaggcaccagtgggcccctctgttgagtggggtccctgtgccacctctagactggctgagggttccatagtgggcagctgcacagccagggagggtctttggggcccggaaggaaagagtgctgctgggagggagggcaggagaaagacctttggtctgcctgctgcaatcacgtttctggagcccaggagtccactcggctgtcagaggagccggtagggggtcgccctccttccaggagaggttgcctcttactgcattcagaacacattccctgggccacacgctggtcggcaccagtatgtggcacagggcacctcccttgttcaggcacctcatgaaggttgtatcataaagggtttcagatccagaaaggcagctaagaatgaccagcagatgagcaggtgcccccaccccatcccaaggaagccagagcagggccggcgtgccttcactgcgcacgttcactgcgccaaaacacgcagggttgtgtggcggtccacactgcctgtcaacaggatcacgtgctttcttgcttggtttctcgtaccctagtttttttttttttttttgagatggagtctctcgtcacccaggctggagtgcaatggcgcaatctcagctcactgcaacctcccgctcccaggctcaagcaattctcctgcctcagcctcccgagtagctgggattacagacaccaaccaccacacccggataattttcatatttttagtagggacaaggtttcaccatgttggccaggctagtctcgaactcctgagctccagcaatctgcctgctttggcctcccagagtgctgggattacaggcgtaagccaccgcacctgctcaccctacttttaggctgagcactgcttgtgagtaccgttcacactgacacacgaggctccactcgcatccgcagctgcgtggctttccctcgtggttattccacagtgtgtctatccgttctccagccagtggacatttagagtctccaagtttctgcattttcacacagcctggcagtgagcggtcccctgtggcatgtatctgagagcttctccagtgcggtaccttgcttaatatgatcatctgctgtagtgcttgatgactatgcccatgaatagccactgcactccagcctaggcaatatagcgagaccctgccttcaaaaaaagaaaaatagccacataggttttcagcagtcctagcctggaaaaaaacaacctgttcaatttgcatgaccgaaagtcctggaccggtggctagcaatatcgtgtgttgcgcactcgtaaagtgtgttatttcaaccctcctccaccgtgctgtatgtgcctgggggccttggccaggaagccaagtgggcggggaggaggctcccagctcagggttagctctgtgtggtccggagcgggatgaactggggggctcctgcgccatcagctctgaggactctgcttctgctgggcatcctcctcacggatgtaacatcccctccagcctgtaaattcctctggagcctgcgttttcagttttgttgtgtacagtgaggccgcgctcacagaaagcacctagcacccagccttgtcgcagagggcagcttgggccaggactcacgtgctccctgtgcaaattcacctacttgataagattgatttgtagccccaaatcattccttttgcagtcttttgcagacaagtgcagagcagcaaaaaatctgtcacccatcgcatatgttcctagccgaggtcaaacaaagccacactgccttctcctagctctcaacgctgtgttctggcgtggatcactctgccttctcccggctctcgcattgtgttccggcgtggatcacgctgccttttcccggctctcacgctgtgttccggcatggatttgcaggcttttagcgccatgtttctcacatttttgggattttgttggtgatttcgctgttgagaatggtcccagcatcatgcagcagtgccgtctcgtgttcctcagtgccaggaggctgggatgagcctcacagagaaaccatgtgtgagagcagttctctcaggcaggagtgatagctccgtgtccatgagttcagtgtgggtgaatcacagtaaatatgaactaaggaaatacgcataaaggacaggtgcagcggctcatgcctgtcacccagcactttggaaggctgaggcaggaggatggcttgagcctgggagtttgagaccagcatgggcaacaaagtgaaaccccgtctctacaaaaataccaaaaaataaaaaataaaaaaaaaaataactctgtgtggtgatgcacgcctgtagtcccagctactcgggagactgaggccagaggattgattgagcttgggaagtcaaggctgcagtgagccatgatcacgccactgcactctagcctgggtgacagagcaagacctggtctcaaaaaaaaaaaaaatgtccaggcgtggtggctcatgcctgtaatcccagcattttgggaggctgaggcaggtggatcacttgaggtcaggagttcgagaccagcctggccaacatggtgaaaccctgcctctattaaaaatacaaaattagccaggcgtggtggtgtgtacttgtaatcacaattactcagaagcctgaggctggagactcacttgaacccgggaggcagaggttgcagtgagccaagattgtgccactgtactccagcctgggcgacagagtgagactctgtctcaaaaagaaaaaatgaaatacacaaaactgggttacatagtgaccatttgatgaacatgttgtgagcagaggctcacagaaacctagctgtgtgtttcccctctgaacagtggctcagtactggccaactctgtgcttgaggtagctttctagaacagagctgccacgaataacgagaagtgatgagctcctgtggcaagcaggacagcacccgccacggctgcccctcacctccacccctggaactgtgactgttcccttacatggaaaatgggactttgcagatgggacaaagggtacggacctgggggtgggagattatcctggcttatccacaagggcccagtcccatcagaaggccctcagaaagcggagcacctgggccgggcgcggtggctcacgcctgtaatcccagcactttgggaggccgaggcaggcggatcacgaggtcaggagatcgagaccatcctggctaacacggtgaaaccccgtctctactaaaaatacaaaaaattagccgggcgtggtagtgggcgcctgtagtcccagctactcgggaggctgaggcaggagaatggcgtgaacccgggaggcggagcttgcagtgagccgagatcgcgccactgcactccagcctgggtgacagagcgagactccgtctcaaaaaaaaaaaaaaaaaaaaaagaaagcggagcaccttcccctgctgtggtcacagggagctgagacaacggaagagagaacaagagatagctgttgaggggccagcgcctgctagctctgacaatggagggaggagggggccgtgagccaatggatgtgggtggcctctggattctggaaaaggcaggaaagccccagaacccccagaatagagtgcagctcatagtatctcaatcttagcccggggtgatccctgtcagggtctgacctagtgaagactttgtgttgctttaatatgtcgttgaagacgtcgtgtgtggctgtaagtcactaggtttgtggcgatttgttgtggtcatcgagaccatcctggctaacatggtgaaaccccgtctctactaaaaaatacaaaaaattagcggggcgtggcggcgggtgcctgtagtcccagctactcgggaggctgaggcaggagaatgttgtgaacccgggaggtggagcttgcagtgagccaagatcgcgccactgcactccagctaggcaacagagcgagactctgtctcaaaaaaaaaaaaaaaaaaaaaaggcgtgtggggggtgacagagaggcgggggaaatgaagagaggcagagggggtggagagggacaggggagacagaggcaggggagacggaggcagggtagacagagagaggcagggggaacagagagaggcagggggacagagacgggagacagagaagcagggggacagagaggcgggggagacagaggcaggagaacggagagaggcagaggggacagagagatgggagacagaggtagggggacagagaggcagaggggacagagagaggggagacagaggtagggggacagagagaggcagaggggacagatgggagacaggcagaggggacagagagaggcagaggggacagagagacgggagacatagggggacagagagaggcagaggggacagagggagacgggagacagaggtagggggacagagagaggcagaggggacagagagagatgggagacagaggcagaggggacagagagagatgggagagagaggcagggggacagagagagtcaggggagacagaggcaggggaacagagaggcagggggatagagagaggcagggggacagaggcaaaggggacagagagaggggacagagagaggcagggggacagagaggctgggggaacagagagagggagaggaggccggtggggaaacagagttgttttttcctctgttagctctcatccctgaaatcaacaaggaaataggaccggttcactttgccatgttggcttgaggtgccctgctaagagctggggttccatccagccttccttggctgtgacactctgtggaactaatcttcaacttcgcagaagttgttccctggcctctggaatcccaccttggtgacttaaaagctagtggactgatagaaaattcagtccccgttacttaacttggattttgaaaaccgtcccctcattcaggtttacacagaacatgctattgcccgtctaagcctgaggggaccacacaccccagaaacaccagagcagatcatgttcaaaaccgccgactgtcctgaagacagttgacaattcatgagtttgacgcacgttttttccagtccaagagctggagccagatacccacccgtgacgccctcccacatcttccaaacgggcacttccaaaccttgtcctgggcatgtttccaagccagcctcactgctgcaggctcatgtcatgccctctctcctgcgtgctcccagatcccacccatccttaaaagcccacggccacggccacctccttcctgcctcaccctggctccctccccgcaaggaggaagcggcccctccccgctggcgtcctgtctgtcatagggccttaggttcttgtgtgtgtgcgagcctgggttacgtgtctttccttttccactgtacctggcacaggtaaatactcattcagcctgacttggacctcagtgatggctccagaccgtggctttgaagaatgggcagaatttggatgtaggaagaagcaaggaaaggagggagagtttccggtgcagggagagagccctgccctgggcatcccttaggcaggtgttggagggaggcccccagcactggggccccagcagcatgggtctgccctgccgtgtccttcccctccaacctgagcccatgcagcatccgtggggccagtccttccagggaagtggaagccaccctgggaggagcctggctaccagaccatgatggcagggtgggagagatttgaatattcttactgctcgtagctcaggaagtggcagcaccagtcccttgtcctttggggcgatgacaacagagaagcaagccttggggggcagggctgctttccccccaaaatacaagtaagcacaaggcagagcggcgtgctttgtgttgacgtcgcagcagcagccatcctggcagtgaggggtcacagtcacggccacaggctcgcccatgcacagaggcacgttctcgaaggcaggaagagcgtgggtgtgcagaggtgcagggagggcgggacatccccagggaaggagttgcgttcaggatgggcagctgtgccaagttcccagctggtaggaagacaggaatgcaggttgattgggaaacaggagagagggcgcagcggctgtggcagctgcctggggtgtgagacagcagcaggtgtgtgtcagggatgtggggaattttctaccaaccttctttttaagttgagtcattttctctcttggtcctttgctgctttattttttttttttttttgagacagcatcttgcgctgtcacccaggcaggagtgcagtggtgtgatcttggctcacagcaacccccacctgctgggttcaagaaattctcctgcctcagcctcccaagtagctgggattacaggcatgagccaccatgcctggggtttcaccatgttggccaggctggtcttgaactcccaatctcaggtgatctgcttccttgacctcctaaagtgctgggattacaggcatgagccaccaagcctggcagtcctttgcttctttcctcccgccctcgtccgccagtagaacctcagaatttgtgtcacggccattgacaaatatgtcccgtgctgtgagcattttggaaccgggacttgactctgtggctgatctggaggcgctctgggcgcaacatgagatttcgtgcacgatcagccagctgtagccagtttttcctggtgtgcgtggtcctgtgagtgcctcaccagggtcccttggagatgggtgtgactcaggtaaggtgtgttccttttcttcttcttcttaagggcctgcatgaagcctcttgctccagaaaaactgggctcagaggcagtgtcgtggggcggaggtgaaacccctggccggccccacacccatcattcctcgggactcagttgctcagtgcacagtagcctaggatcgtagggtggtgtatggtttctgttttttttatttttattttttgagagagttttactcttgttgcccaggctggagtacaatggcgcgatctcagctcaccacaacctccgcctcccgggttcaagcgattctgctgcctcagcctcccaagtagctgggattacaggcatgcaccaccatgcccagctaatttttgtatttttagtagagatggggtttctccctgttggtcaggctggtctcaaactcctgacctcaggtgatctgcccgtctcggtttcccaaagtgctgggattacaggtgtgagccaccgcacctggcctggtggtgtgtagtttctaaagcacatccacgcctgagatggttgagaaaaccgaggctcagaggggtttgtgttcctgctcagagtcacagccccgaacggcagagctggaaccacatccagtcccggtgtcgcccatccaggcaccctaatcccacgtcagcctgcttgcctcgtggcgttacggcacacctttgctctgatgtgttactggcacacctgagctcccgagggcagggctgcttcttatttatttgttatctcaacaactagtatttattatctcaccatatactcagtgactgacgccacctgggtgccaggccctgtgctgcctctgccacccctgtccctgtgcctggccctgctggcaggaagcttgtgtttgaggacagagaacttggggtgggttggcgacgagagcctgtcccgagtggtgtccctccaaggacgatgagccacagcggggcagaaggggccctgggaagcaggctgcacccgccagaatctcccaggcccgggacccaaacgcgagtcttcagacaggagaggctgcagtcttctcgctgcaggggagatggtggggggactcgggccatttgcctgcttcctctgtgctgaggccgtggtcagcaattctgagattcccagcccgggtttccaccaccgacatcactgtgtaaggagcaggcagtgcctctgagcggccaggggcacccatgcgccagagccagtgcacgtgacctggcgagggggcaggagtggccactgcaaggtgacagctgctggcacctaatgctcgcagagggccccagtgcacaggcgcggctggctgtgcagagctgctgaccgcctctcaccaccccctgccctgccccgtgccacccgggatgacttctggcctgggtgcttttggtagccacacctcagaaaacctgtcttcgtgactgtgggccaccatgggcatgagtcacctgtcaccagagcctggtgtccctgtgtaagtgtgccagataggcagaggagacaggtgaaggcacattcctcagtgcccgctcacagctctgcccaccacgcattctgtagagaacctcagtgccctcctccctgctggcagccaggcagggatttaggcggtttctgtttggcctccagtgcttgcctctcccgtgtcctatccgcccagacctcagacctgtcactgttcccgggcatcctcctggataagaaactgcccaaatgtggtagctgggtccccaggatgtgagtcaggctaggcctgcctagctcacgttttgttctttgcaaattttcccaaccttgcagctctctggggagggagccagctccaggctgggaatgggcctggcggcctccatcagtgtcagcccaggtgaaccgtccacgagccacaaaagggaaggtgatgggaggagtatcatctggctgccttccgggtcactgcggggagttgctgcccccggagcttagctgctgtcaaggggtgggatgtggcgaggacccccaagaggttgcccggggtcctttattctagggcgctaagcattggagagtgcttcctgtgtctgagacgggacagcaggggacccgaaaacaagcaagcaagaggaatgcgaggccccgtgaggatagcaggagggtggggcagccttgcagccatggggacatttggatggacagagccctggtggctaagacccagcatgggaagatccagggaggctcagtgagggagaaggaacagcgagagcaaaagctctgaggggagatgggggggccgcccaggcagatgggggtgtaagatgaagtgtgaaggggcaggcgcacgagagaggaggcatcagtggtgtgttgggagaaggtgaggagaccagtgatggggatcaatcaggagagcttcctgtgggaggaggcttctctgaggtctgaggtctgggcggataggacacgggagaggcaagcactggaggccaaacagaaaccacctaaatccctgcctggctgccggcagggaggagggcgctgaggttctctacagaatgcacggtgggcagagctgtgagcgggcgctgaggaatgtgccttcacctgtctcctctgcccacctggcacagctgcacagggacaccaggctctggtgacaggtgactcatgcccatggtggcccacagtcacaaagaaatggaagtccttcagaaatggaagggatcttagagatggtgaagatggtttctgtgtctcaggaagggctctgggctttcgggcaagtctcctcagctctcagggagtgagggaactcacggcccctcgttgagatctgtgcacctgcagcctctcaccgctgtcaccatgccccgcagttctctctccaagaccatttccagtctcttcctgcagggctatgcattgcctcagctccttttgaggagctgttgagaaaagatcgttttttaagaaagccttatcgttcctgtgcatgtgggtgatgtcatcacactctgccccctggacgcagatcctccatgctgcccccagtgggaacaccagcctgtgctcagtgctgcagagctggtgtttccctgccaggcggagcctcaggggatttatcgcctcatttgtttgtgggttggctttttccttttataagttttcatcggaaactgattttaccagttgtatgtcacacagccctcctgcctggtccccaagatgagaaattacaatgcatgatgcatgaggctgattttcatgtagatgtgttcgctcgggctggagctctgggtgtggtttgttcctgggagaggagccccaggcactcactggcatctccatgtttggatgaaaccctgtgcaagggcaagggtgggagcgtgtgtcccacatagctgagccccctggttggcaggcctgtcctcccgtctcctgggaaggtagcatgagcttcccacctgctcccagattcctcgcccagccctggggcgttgcccctccccttccacctgccctgactgcattccaggcagagccagggttggtggggcctgcagtggggatcccttgaccttcctagccactcctgctgtctggccttgggccaggcatgtctctcctaggcccttagctgtcctgtttatcaagtggagacatctgcccagaggcggcagctgggccaggtgggggctggagggcccggctggctctgtccactcctctcggggttgtcctggagctctgtggggtcagcctcgcaccacagacagtaggtcccagctttccacagcagagggcaccccttctcccccacgcatggaggggcaggtgggtctcgtaggtgcccgaggggagcaggtcgggctcagtgctctgctgcctcctgggcagactggtagtggtgatgggagccccagggctgccggtcattagagccgagcccaggtcaccgccctgccaccatgtgctgggacagcgtgtggcccatggcttctgccagacgggcggtgagggagcccccaccattgggcagcactggccagcctaggccccatacggccaccaggcgcagcccgcagcctcccccacacccatgtggagctgggccaggcagggtgcgtcctcggcatgcgtttccaaggactgctgagtcacctcaggggtgactcaggggcccaggggccaggccagagccaagggggacagcaggggagaggccgggctgcaaggccacagcacgggaagggcagcatgcggaccagaggccaagcctctcaatgcagacgagggccaggaggccagggaggaggctgtcccgggagaaacgccgattgccccatctagggcggacgggccaggttcgggctggtggaggccttccgggatgcaggccctgcacagggttccttagggtttaaagtcagcagccagagctggaggcctcatcagaaaggcagtgtgggctggactcccgctggtgactttgctgtcagcacaggagaggtccttctggccctggggctgccctcacggagcctccggccaccagaccatcatagaccaggcctgaatgtcccctttctctctcggggatggtcacagagctggcccctggcccctggctgccactctgttgtggccaccgctgagcaatttcctgtcgtggctgtcaccacttcgtctgcgtgacttctttccagtggctgattccctctctgcttccagttcccctgatgtgttggcctcagactcttggatggggcctccagggcccatctggaggatttctcttgcctaagtttttttctccccctcattttcatgtgctgtgacttcaaatgacatcggctcgctgccgcgcacacaacaaagcatttatcgctctctgccaatctgagagtcctttctccagctccaagagccaggagtcaggcagggcagggcccgacagcctgagagacggcatgaatggccagcaccacagttggcagaaacgcacccccaaggcgatttagactgcggtggccgggccgcaccatggcccccaatgtctggctgtctttccctaccatggcacccagccacacctctggccaggaagtctgtggcaggcctgtccccacagcctgggggccgtggggaagccgggctctcagggggccctctgtggcctggtctgaggcagagcccattctggttccagtccagagccggtatctcggttgccagcccaggcccaagggactgcccctttggctgagaggacgcctggggcttccagagccactgtccttttgctgccagagcttggttcccagaggagcgcctgacccgccacagaggtgggtctgtggctgtccccgggtgcccaatctggccatggtggcagcgtctggtttggggtttccgtgagaaaataatttcagaaactttgtcttgattcattgttttcagtgcctccgttcccaaaggctgctttttaaaaaccattcagccttgatggacaggaggggagatctctactgagaggctggaggctcgaaggacagtggcaaatccagggctctcagaactcccagatgctgaggggagccccggctgtcgggacccttccctccgtgcatcacacacagtgggtgatgacccagtcagccccaaggcagaggctccctccatcttcccttgggctggggagtgggtttctgccgtctgattcctcgccgccgggccatgaggatcacctggcacctgtgagggtcacttggcacctgtggtgctcctgtggccccccctcccactgctcctctccctccccctcctggcctcatccctgagcatgtgcaggaatgactactcctgcttttcacctgcggatgccctgcaggctcccagaccaggagcccaggggccacaaccccacccatgccaggcacttactgtcacaggaaagctcagagctgcctgcagccagcgccgcccctgtagataggcgagctttcatagtcagcacgcaagggcctcaggtctggagagtccccatgccactggggccactgaaggtttccaggaaggacagacagacacatcagcaagccaggagcctgggagcccacatggaaaaggggacacgaaggccagtggcttcctgtgtcgctgggcagcaggccgcctccaggctgtgcgcgtcttcgactttttgactcatgggaaagaagctgtgatggactcgaggtggccatgtgtgttgggcagtggctcccaggtgttgggccagcagggaagggcgttgcagatggaaaggggttcagagacacacggatatgatacatccctacatcctttgcccctgccctcttcccacgtcagggctttttctacaccacagggatccttacgtccctccctggggcctccaccccgaccctgtattccagctgttttgcacagaggtctgataaggactctgctgcttctgcaggccttaccctggctttgcccctttccatggctgaccaggccttgaacacagctgcagtgttagaactgcgcccactgtgaggaggggctgagcactcgcctcctccacgtccccttcagcttcctcctctgtgacgttgggggccgggcacagagtgcctagcatgggggctggcacatgggactgtgaatagtggcccttgttccgtgtgtcctgcctgccctgtccctggtcctgcaggtggctgggcctggaccccctcctatggtccccagctccccaacccatgctttgtcctggggctgttgtcccctagtcctgtaaatgtatggccttggccaggcacactgtgtcatgcctgtagttttggcacttggaaggctgaggtaggattgcttgaggccgagtttgagaccagcctgggcaacatagtgagacccctgcctctttaaaaagaaaaaaaaagatgaggccttgtcacaggtattcgctgcggttgaccagccgtgcccacctgccatttctccgctctgtgcctggcactgggcgaggcccctgtggtctgtgcgctcacagattccgctgaggaggactgcagggagggacgcggagatggctctgtagcacagcgtgcagcaccacagcaccaccgatgccgacgggcaggcagacaccagccagagacccgctccccagccgagggaggacccgtgaactctgctgtgaacctggaaattaccaagcaccacagcatgactgccagtgagacctgaggaccctggggccgacccctctgcgggcaaatgtggcgcatccctgcaggctgggccacagcagccctcccttgccctcccccacgctggctttcttctttaaaagagaaaaaaaaacaaaaccctgtgaattcatcagagcagatagtctgctggggcaccaagcccgagacgggcatttgtgttccgtgctgtgtggatcaggtttccccgctgagatgtttaaatcccaaggccgcccatcggcagcagccagctccactcggcaggattcggaattttcctcctgctcctgccaagtggccaccacagctgtgcctgccgggcacagggcagctgcccacacccctctgggtaaaacctgggattctcctgcctacggtagccctgtcctgactctcagtccacagtgtcttcacagttcatttctgtatttttccaccttgtattctctgttctgtgtgtcacatcccttgctcccctccaaagagagccaaaggtctaaactctaatgaatgccaggcttcaaaggaatagcccccttctcccagggggacaagagtcccatgctctggggcaaaaccccatcttcgtgtccagcttgctcgtttcccaggtgcctggctcacaggtgacagagtacagggtcaggcagaaaatccatgcggcatgcaggtggcgggtgcaggtgggatgcgtgagcatagagtgggcaggtctccgctgggcatctctgggcaaagatctgaaagaccacaagccagtcttgccaaaccctggggaagtgtccggcaggcaacagtgggatccttcccagaggccactgccaggcctgactgagccggggcctctcccatagtgacttctcagccctggtcctcgcctggcagggttggccaaacctcacttctccctgctccaggcggggacatgtcacagcctctgtgggaggccagccggcatctgaagcaggggcagagtcttggagactgttccctcttgggctcggcctgtttgttccaggcatggggagagaaggcgctggtgttgctctcaggatggcagcccttgtggggcctgcggttggtcactcggggtttgcagctggtactctgaccccgtccaggtggggccctgtgggagagtggggagggggcccccacccaccctgccaccctgatgcaggttcagtcagcggagggtggtctcacccctgagccctgttgggtccctggctactgagtggccccattattttcctccgtttcctgccatgcggggtgggaacaggaggcgagccttgtgggtatgggatggactcgagtgcggagctgtcattgccactgctgagtccgctgcactagtcagggctacagccagcctgcagagtctccctcggcaggaatggactgctgggaccatggcctcagtcctccctccccaccggtagggtctctgatgcgggggcattggggctggctgccccacaacaggcagctcttgcctggcagatggcaccagggttaggaacactcgctcctgacagcgagcccagaggcgccctctggtgagcctccccgtggcgcccagctctgccgcagactctcggtcccctccgtgctcagcagtgtgctggtgtggagaccgcagtgagtagggccccagcgggcaggagcccacgcttggtttccgcgcttgcggccggcgctgcacgtggcccggctgccttgcttttcccgtgtttcccttgtggctgctcatccctgtgtccatctgtgctggtttctagcccataagccttggagagaaggggccttacagggttgtgtcccctgcccagtgcctggcccgtgggggaccatcagtcaccacaagggacttggctggagctgagcagagggacccgggtagttagggcacagcctcccgggtgtcaggggtgcgaggagtcaggcggttgtgggggttcaggaagtcgtcctggggctcaggaaggcagggtcctggattcccaggtgagatgggcaggtggggccagggccagagccagaggccaccaggtgggtctttggtaccgtggcgggtccccagcccctcccctcagaggcaggatgtggtcctcgccggtagggcctctcctcctgccctgtgagaggcagggggctggggaagggccctgacggagccactcctgccagcctgcacactgggtcctgcctgggcaggtcgtggggccggggtggcctccgcccagaaggtgtggtttcgcagcccgctggcttcagttctcctcccggcttcccagaagagtccagtctcacatcagccactcatttccctctccggcagccgctggctctgagcacgccctctctcgccacaatcaaaagaagtgaaactgtcccaggaaatagagtggaacgccccaaaaacacctagggagggggggctccttcctcctaatgccttcagcagaaatggagggcagccccactctcctgccccgcaagggacagttcctgcttctcacctgtgccagagtcagccctcccgcggtgggtgtgacgaggtgattttttttttctttcttctttcttttgagatggagtcttgctctgtcgcctaggctggagtgcagtggctggatctctgctgactgcaagctccacctcccgggttcacaccattctcctacctcagcctcccgagtagctgggactacaggcacccgccatcaggcccggctaatttttttgtatttttagtagagacggggtttcactgtgttagccaggatggtctcgatctcctgacctcatgatccgcctgcctcagcctcccaaagtgctgggattacaggcatgagtcaccgcgcccggccaacgaggggatttttaagaagcttccaaggtgctgtgtggctgagttgagagccaccaacccacaggcaggaaagggacaggggtcagaggcatggggcctgtgctcactgaatgcccggcacaccccgcacatgaaggcaggtggacagaaagggtcccgatgcgtgggtgaggacagtcccgtggtgtgggggcttccagagccaagccttggaggagggccaggaattccttggcaaaggggctggtgtctttttgggcaggttgccaggacacaagaccagccgtgtactccgggcaggctaccttttgcagaacttggggttgggggcatttgcactcatggtgccttgggctgtgacctccaggcatgggctagagggtacaccaggtgcctggcgtgggcagagccccaggctcaagcttctcctgcccccgcacttcctgctcttgggtcacttcctcccaggctgggtcctaaactcctgactgccctgctggacaccccccagccccacacagccaacgcagtgtggcaccacacggaccctcatggcatcccttggccacgtcttgtgacagctcggggcaggcaagcaccaatcagacctggggagcaccaggggcacaggccatggcccacggcacgcaacacctcactctcctgcccaggccgtgtgtgcacgtcttcacacaagtgatcagacccgggatgttaaatttgccgatgacttcagagatggcacaccctgtgacacttggcccccagagggcagggccaagcttgtgacctcaggcggcctccctctgggagcctccatttgtggcagggcctggcagccactcggctcttcatgaagcgctgtgtgctgggaagggcctcacactgtccatcctcactctgtgcggcatcccttggcgccaggcacacatgggatacgtggggtgaagaaagcaacgcctgtgctcagacagcggtgctggggttcagtggttcccgccatgttccatgggacatttcagggctgtttttcgcatcccaggcgctgtcagagggagtggtttgggaattcagtgcttgcttctgccttcccaccacacgaggaaagacgctgtaagtgcctgtcattgtcatcgctttcaccgtagctgagagccgtgaggaccaaggtgtgccaggcctgtgttgactgccttgtgaaactcagtgtccacatggggcaagggctgggctgtcccatcctgcagacacgggcaccagagcacaggagaatggcggcctccctgcccggctgcctgcacctcttctcgtaactgtcagctcctgctgcctctcccagccaagctggcaggatttttttttttaagtagaccccacatactcaaggatgggggcagatccccacattgctatctgtggggatgtttgtgtaggcgcttctggaagcagtgtcttctgagccatgtgttctcaggctgaggctctggactccaccgtggcccagatggggcctactgtggcagggtccccagtgggtatgtgagtggcagtcgggacacacacaggtgggcaggccacccccaccctccccctccccctgcaggcccaccctgctctgcaggcagcgtgtggccctggggtgcccacggcagtgcctgaggtgtgtgtcctgatcacttggcctcctgcctccagctgtggatgcgatgtggctggaaggcggctcagggcctcctgtcctcttcttcctcctacccctgggctcacagcgtttcccctcttctgtcctctagctggtcagtgagaaggtcggaggggccgaggggaccaagctggatgatgacttcaaagagatggagaaggtgaggaagaaactgcgtgctctgtgtggtggtggcactgctggggcctgacctctgccgggcatagtggaggcggccaaccttgatgggcctgggtctggagtgatggggcccggcaggtgtggagagatggggtggtgtgggggcctcgtcagctggacttgacgggcaccagctctctcccctgccgtgggcaggcagctgtggggacatggctgagctgaagacatggagagggggttggggggtcctggtatgggctcttagggcaggaggcggtgcagcagcgggggtcttgtgtgccttgggcccccactggctgtggagtcttatatgctgcttctcttcacagaaggtggatgtcaccagcaaggcggtgacagaagtgctggccaggaccatcgagtacctgcagcccaacccaggtgggtgctccagccactgccagggcctgccccaggccctctggcctctgtgtcagagggaaggcaggggatgacagaaccgccaggctcatgggttgtgggcttcaggcacagctggatcccggagtgcagaggccatccttggtgctgcatgctgcctttccacctcaaccagcagctcagcccctctgttggcttcactctcatgccgactggttcctcagggccgtcccagccttcaacccctcttccagccagcagtcctggcagggagcctctcccccagcttacttgtgggatccatttgtattggccgcccctccccagtgcccctggcctggacttcacctcttgggcttgggactgggtctccctggctgagagacgggcttttccccaaggaaaacccaaatgctggctccataggaggccacggacagggggcagacgcacacccagcagtgtccactcaggccctgccaggagcagacccaagcgggcagcggaagggacacagctcatcacccaccccgggagccttggcctcaaccaccccccgctgcacatcactgctgcgcctcctccctggcaccccccagatgaggggtcatagccacgttccaagaggagcagcccttggaaggaggaggttttgccccctgaggagcttggtcacctctccacccgctgccagctcctttgaggctagcaggagcagggaagggaccctctggggattccactgtgctttgtgtggcctaggctgtccacaggcacaggaagcaagggtggggaggagatgtgggggctgcagtctgccagggcagaggagtgcaggcctcacagcccacacccacctggccatcctatcccagcctcgcgggctaagctgaccatgctcaacacggtgtccaagatccggggccaggtgaagaaccccggctacccgcagtcggaggggcttctgggcgagtgcatgatccgccacgggaaggagctgggcggcgagtccaactttggtgagtggtgctctctggaagccacgcccaccgtccctggaggccacacctcaacacaggcagggcaggtccaggccctgcatgtgctgagtgccggggacgtacagtggcccccacagctttccagctgcagaggtgcaggagactgcacagaccaacccatccagcactggccagcagctgatagggccccttcctgtagctccagaccttccccaactcaagccagctgcttccccagggcctggaccccccagcatctgtccttccacctgttaagggcaaacctaggcccttttaggagcattggagggtctggtttaacgtccagcatcgattcggattttaggatcctttgttttgccctgagttccaatttccgggccctgggcttagagtgttggggggctgttagaagttgggatggggccaagtgtggtggctcatgcctgtaatcccaacactttgggaggccaaggcaggtggatcacctgagatcgggaattcgagaccagcaagaccaatatggagaaaccccaccccgcttctactaaaaaaaaaaaaatatatatatatatatatacacacacacacacacacacacacacacacacaattagccgggtgtggtagtgcatgcctgtaaccccagctactcgggaggctgaggcaggagaatcacttgaacccaggaggtggaggttgcagtgagccgagactatgaaaaaacaaaacaaaacaaaacaaaacaaaaaccgggtgcggtggctcacgcctgtaatcccaacactttgggaggccgaggcgggcggatcacaaggtcaggagttcgagaccggtgtggtctatatggtgaaaccccgtctctattaaaaatacaaaaattagctggatgtggtggcaggcccctgtaatcccccttactcaggaggctgagacaggagaattgcttgaacctgggaggcagaggttgcagtgagctgagatcatgccactgcactgcagcctgggcaacagcgagacttcatctcaaagaagttggaaaggatccaggtgtgggggtgaacgcctgtggtcccggctacttgggaggctgaggtgccagcatggcttgagcccagtttgaggcctgcagtgagctggtacagcgccactgcgttccagcctgtgaaacgctatttcaaaaacaaaggctgaggagtgtctcagtctagtggtcccaggcccggtatgatggcttcccccaccacttctccacaggtgacgcattgctggatgccggcgagtccatgaagcgcctggcagaggtgaaggactccctggacatcgaggtcaagcagaacttcattgaccccctccagaacctgtgcgagaaagacctgaaggagatccaggtgctgctcctgcgccagcctggggcctgtcccttccccctgccggatggggcagccccattcctgccaccctcacctccagcctcggcactgccctctgggtctcaggcaggcaggatccccagtggtgcagggacagtgggtcaaagccatgcgtggggcggccctctggccgctactggtgtgacccatgtcccccacgtctccagcaccacctgaagaaactggagggccgccgcctggactttgactacaagaagaagcggcagggcaagatccccgatgaggagctacgccaggcgctggagaagttcgaggagtccaaggaggtggcagaaaccagcatgcacaacctcctggagactgacgtgagtagctcggggtgtcacatcctgagaagacctatgcccttgggaggccggggtggtgcctcaagggagctggaggacagatcggcacctacctggccgctgcagcaggggaggtggagggtatgggccccagtcccctgtcccctctcagcccccttgcctcctgtggcttcacctcgggagtcagggaaggcacaggacagtggcactggcaggagcccctgagccctactgtccccacagatcgagcaggtgagtcagctctcggccctggtggatgcacagctggactaccaccggcaggccgtgcagatcctggacgagctggcggagaagctcaagcgcaggtgagcccagggccttggtctctccagagtctgggctgccatgcgccctctgccagcgcaagtgggcagcacacctcgctgtggggtgagcacatggcagagcagcatcctggattcttcctggggactgagtggaaaggcctggggggccgcgaggtcagaggagctggggctctgagaactctgagtcaacacccagccctgccccgatgcaggccccggggactccctccctggctgcacgttgctgctgccacaggaacacccaggctcccctccctgaatgcagaggccagacctgcttcaggggccttggcgtatgtggggcgccgtccgtggtggggaattgggggaggaggcaggggatgcgactgggggtgttgtaggtagatgctgtggcaggccccagctgcttggcaatctctgggatgcctccaaggtgggggtccaggctggaggccctctgggtagacatcccagtctagctgtgtcccagggtccatgtgtcacaaccccactgacggcctcttcctgcagtcccaggccaggtcattaggcagcagcataaatacaagagtggggctgcctcggccgtgacacgggctcggtccactcacgcctctcccttcacaggatgcgggaagcttcctcacgccctaagcgggagtataagcccaagccccgggagccctttgaccttggagagcctgagcagtccaacgggggcttcccctgcaccacagcccccaagatcgcaggtaatggggcatggagccctcttgcggaggcaaatgccagcgggtgggagtggccaagggctggccctgtcctgggtctctgagcgccagactcctgggtgcagctctcagccgtgctccatctggaccgccaaggcagacgggaagggctggccccagccttctgcagaaggggccctgcccgaccgttttgagcccacagcctcctcgttttgcttgtgtttagcttcatcgtctttccgatcttccgacaagcccatccggacccctagccggagcatgcgtgagtgttcccaggcccgcctcgacctcagtgctgccttctcggccattcggggagggtgtttctcctcccgccctgttctctgcccatctcaagcagggaggggccaggctcgtgcagcagtagggggcacaggccccacagcctgcaagatgccacccctctgggtctcagcctcacagtgtgaatgagggattgccaagggcactagcccagctagctctaggctgtgtggtggctacaagggcttgagggcatctggtcactccctgtcaccgcagcagcaccgggtgtccccagcacttcccaggagtagctttggtgaccacttaaaccaagcttctcccatcctccctcctgggtggcagtagaggccggaccccagaagtggcaggggcagggggtggcccaggcagggcagaggggaggcccatgcccacccacacgctccaggtcacagcaggtctgagaccccagactgggcggggtgaggcgtagcagccccagccccacagcccgctcccgcccccagcgcccctggaccagccgagctgcaaggcgctgtacgacttcgagcccgagaacgacggggagctgggcttccatgagggcgacgtcatcacgctgaccaaccagatcgatgagaactggtacgagggcatgctggacggccagtcgggcttcttcccgctcagctacgtggaggtgcttgtgcccctgccgcagtgactcacccgtgtccccgccccgcccctccgtccacactggccggcaccccctgctgggtctcctgcattccacggagcccctgctgccagggcggtgtctgagcctgccggcgccacctgggccccggcccttgaggtactccctgagcaggaccccacacttgggtgggggggcttatctgggtgggtggggatgcctgtttacactagcgctgactcccaacggtgacggctcccttccccactccatggcgccagcctcctcccccgctccccaacttctcgcccagctggccgaggcggggcaacactaaggtgctcttagaaacactaatgttcctctggggcagcccccacctccgtcctgacccgacgggggcccggcccactgcctaccctcgagtcccgcagccttaacaggatgggatcgagggtccccatggggtggctcagagataggaccctggttttaaatccctcccagcctggtgctggtgatgggccctggccctactccagggccaatgcacccccgcctcacacacgcactccttctcctcaaggccagggcagagggcctcaccgcctcccgggcctgctgtcagcttgcagcccggggacagaggccagctgggatctgcctgaggacagagaacatggtctcctgcagggccctgcctcccaagccccgccctcagaaagccaagtaccttttcagctttttaactgcccccatcccaacccagggaggcctgtgtcactctggcacaagctgccaccaccagccacccacacccaccccagcacacctcacacgggaccacagccgcgctgccgagggccaagcacaaaggttccagtgagcgcatgtcccagcccctggtggccaggctccccttgctgagccgctgccacttcaccctgtgggaagtggccccagccatctcctctagaccaaggcaggcagccccgacatctgcttcctctatcgcccaatgcaaaatcgatgaaatggggagttctctgggccaggccacattcacattcccctccccctgtggtccagtgaagcctccggaccccaggctctgctctgccctgccctgcacccccctcgtcagaagtacatgaggggcgcagagatgagcacacagctttgggcacggtccagggcaaactgaaatgtacgcctgaattttgtaaacagaagtattaaatgtctctttctacagccccttgcctcgtcttggtgcaggggtgggcctgccacccaccgccttcctgaggggccggctccaaagccacacacaccccaggaggtccctccagcaccccaggtgctcctgagcccaaggtgggtgggactggccctgaggcttttgtgccagttcccaggtgcaggggctgaggggtatcctggaagttaatgccctgccctggaagtgaggaagctggggtgatggtaccagcctgggcacccagccaccctcaccccagccttggggagaccagcgtggctggctgctgcttccgtttctttattacctgagcccatccggaccctcaagacaactggagcccaccctgccctggaaggctcagctcccctgcttgaggacgccgcacacctgttccaggacgtgacacaggctctggtccttgggcgtcctgctggccaaggagatctgaaacgagggggctgggcctcaggctgtgcccgggggtcctagccagccctgcgcctcacagtccaccgtgcaagtccagcatcctgactgagcccccctgagaccgaggcacagggctggggtcccgcagcacagcctgctgcttacccagtggggcagtatgtaaccgagggcctggctcccaggggcagcggtgctgtgtggaggggtggggcttatgtgcacactcccgatcctgcccccacttcagcccctccctgcctggttccagacacccatggggacaccacagcctccacagctagccgagagctgagcagaatgagtccctttctatgccaggtggagggaaaccaggaaccactaccctaagacactcaggggtggccaggaccctgggccctctgcaggggagccactcccaaaacccgctgccaggacctcatccggcactgccggagcttaaagctccacagtccaatcaaatctggcctgcaccctgctggggtggccacggggtgaccagggtcaccagtctgccagctgggctgtctcaggcccctgaggcccacggggctcattgctgccaccttttaggctgcccagggggcctctcctggggccccgttaggaggtctgcggggacttggggctcaccttaagcttgtcgaggtaggtgtgctcctggctccagggttcctggagcctcacgaggtcaggggaacccttgtagaactccaccagcagcatctacaggacagaggagcatggactcccaggctccctccaagcctgaggtacctcagcgcctctcctggggttccagtctcaggcagccctgagacatgaccccatcactaacaaaccaaccacaaagagatcacgagtgaccttagccagagggctcacctagcttaggtccaggagggctctctcgagggggaggcagcagcgttgcccaagtggctgccacgagaggtccacctggacctgcactcaccgagcccagttctccagaaccacgcgggcctgacgtggccccctggttcggcctcatccccagcagtgacacctgtgaggtcacaggtttgacgaactagtttaggttttgttgggttttttccttgaggtagggtctcactctgtggcccagactggagcgcagtggcgtgatctcggctcactgtaacctccacctcccgggttcaagagcttgtcctgcctcagcctcccaagtagctaggactataggcacccgccaccactcctggctagcttttctatcttggtagtgacagggtttcgccatgttggccagactagtctcgaactcctgacctcaggtgatccacccacctcagcctcccaaagtgctgggattacaggcgtgagccactatgtctgccttagtttagtgttttaaatgcatgttgaacacacaatttttaagtgttcatccagttaccacccaaagtccctggggtttctctactggacagcctggcagaagaggccagtgccttagagaacagcaggtggggaggtgagggagggcagaagttggagggaccctggcaagggcctggactctgtcctgagtgatggaagaagccctaacccaggcccccaaggcgccaccagccatagcttcccaagcccaccggtgggaagcagaccaacgcatcgtgtgcccagctgcgcactgccagcccctgcctgcccgccccgcagcgagctcaccatctcgtgaaggatgtcattggtcaggaagctgtcctggacgtaggccatctccacatccatggggatgccatagtcactgggcctttgctggcagggacacagaccagtgagagaagcctcaccagcccgcagcccatggcagctggggacaattggcagtgcccgggctgggaacgggagagtgcacaccccggctcagctctgcaccgggatcggcacctggtggtgggaccagggaggcagtgtagcatccttactgtgggagaggcccagaggagagccagggccctgaaatgacttcccagggctgacctctgacttcagggcaggattggggaatgaagccaggcagggtcaggaagggagccctctttgtactgagcagccaatgacacaacggaggccccacgcccaggacctcaccaaaatatgggcagggcagcagtcacgtccccatttcatagatggagaaactggggccccaactctccagtggagcctggaaccaggggcccctgcctagtcgtgacccaaatgccccagtgctcccgggccccccaggctctcccaacagccccacctacctcgggaggaggcatcacccagaaaggtgagatcttggactcggggcctgggttgccagaatagtaaggggctggcgggagagagggagaggggttggccctgggaggctcggctggcccagcatcccccctccttgctccccccacagccccatcccgcgtacagcagagcagggcgaggcagggctggaagccattgctggagccctgcagccgcagctggtagtccatctgtgcgtcgatgtcctgcagagatggcagcgccgggctgtgtgggtggctgtggtaccagcccaccagggacaggccccgcaggaacaggctctggtagatctggggacagaggcgcagctcagcgggcacaggggcctgaacggctctagtgagcttatgtggctggccagccctgaacgaattcctgctgtgtatcaggcctggggacacagtgatgaccaagacaggccctgcccccaccgccactgagtccagtgggagctggagagacagccaacaaggacctcttttaatataaaagatgcaccctgccacaaagccaggacaccaaagtcattttgttcactgctgtagcccagcttacagaataatggtcgccacacagtaagcactcaacaaacagttaaaactaggctgggagcagtggctcacgcctataatcccagtgctttgggaggctgaggcaggcagatcacttgaggtcacgagttcaagactagcctggccaacatggagaaacccccttctctactaaaaatacaaaaattagccaggtgtggtggcgtgtgtctgtactcccatctactatggaggctgaggcaggaggatgttgaacctgggcagctgatgctgcagtgagccatgattatgccactgcagtccagcctgggcaacagagcaagatcgtgtctcaaagaaaaggaaaaaaaaaaaagaatagcaactggcacttatgagtagtgtttaatagatgaggcctggcactgagcattcaatattagcagcccttcactttttatgttcttagatatagggtcttgctctgtcacccaggctggaacacagtggcgccatctcagctcactgaagcctcaacctcctggactcaatccatcctcctgcctcagcctctcaaatagatgggactacaggtgcgtaccaccatgtctggctaattttttttatcttttgtagagacggggtcttgctgtggccccaggctggtgttgaactccagcaaacctcctgcctcggcctccctaagtgctgggattccaggtgtgaacccccggtgcctggatctgatggcctttcattgaagccgctcattttacagacaaggaaaccaaggctctgagaggggagggggctggcgaggtttcagcaccagggctaggagatccaaaagcagtgctcttaggctgggcgcggtggctcacacctgtaatcccagcactttgggaggctgacgcgggtggatcacgaggtcaggagtttgaaaccagcctggccaacatggtgaaaccctgtctcaactaaaaatacaaaaattagctggagatggtggcgcacacctgtaatcctaggtattcaggaggcagaggcaggagaatcacttgaatccggaaggtggaggttgcagtgagccaagatcgcgccctgcactccatcctgggcgacagagcgagaatgtctcaagaaaaaaaaaaaaaaggccgggcgcagtggctcacacctgtaatcccagcactttgggagaccgaggtgggcagatcacgaggtcaagagatcgagaccatcctgaccaggcacggtggctcacccctgtaatcccaacactttgggaggctgaggtgggcggatcacgaggtaaagagatcaagaccatcctgaccaacatggtgaaaccctgtctctactaaaaatacaaaaaattagctgggcacggtggctcacgcctgtaatcccagcactttgggaggctgaggcgggcagatcacgaggtcaggggatcgagaccatcctggctaacgcggtgaaaccccgtctctactaaaaacacaaaaaattagctgggcgtggtggcaggcacctgtagtcccagctattcaggaggctgaggcaggagaatggcgtgaacccgggaggcggagcttgcagggagctgagatcgcaccactgcactctagcctgggtgacagagcgagactccgtctcaaaaaaaaaaaaaaaaagcagtgttcttcacccttcaccatggggtcccaagcacacagacgggcatgctcacctgcacggttgctgggtgatgacactgccagccactgggcagtcgccaggacagctatgtcccttcccaaccctccccagaatgccacctcccaggtagcccctcacctcctcttcgatggcagctgcagtctctgcgtccccgagccggctccgacaagggaaggctctgagcaccgtcagcactgtggggaggggcagctgtgaccccgtgaccccggtcctccaacgcccccgcccacctggccctggatacccactctggctgttgacgtcccagcggccccccaggtaacccacgacctcactccgtgtcaggtgactgtggaagtcctggggaagggaggaacagcaaaagactggctcaggctgtggccctgccccaacactggagccagcctgtgccctcattctctttgagactcagtcttgctctgtcgcccaggctggagggcagtggcacgatcttggctcaccgcaacctccgcctccccagttcaagccattctcctgtctcagcctctcaggtagctgggattagaggcgtgcaccaccatgcccagctaatttttgtatatttagtagagacagggtttcagtgttacccaggcttgtctcgaactcctgagttcaggtgacccgctgcctcagcttcccaaagtgctgggattataggtgtgagccactgggcctggccacgcaccctccttcatacatttattgagcacccacagtgtaccagtagcaaacaaagcagacaaggccccagctctcatggagctgatacgcaggggagccccgcccgctgcccaccgactgggctccggagccccttgcccctagacagggtgggccacacaccagcaggaacagcacgttgctagaaacagccacgttgaacggctggaacttgttgatggctgcaaaggatgttacttccaccagggtgtgggggttcctgtaggggccaggagggtcgcacagtctcaggaatccccaggctcttccctcgcccccacactgactcccccaaccccacagctctgaggatctgaggctctgtcccaccccccacccctgcccttgctaccccaagaccagcaagagatccaggtgagctggggcaggggcagaacttggggtgagtctgacctggccaagtcgcggctgcccagcatgcagtagcggaccggaacccggatcttgctgtccacccgcttccctggggttgtggcctctgggagagaaaaaggcagggtcagtccctccccagcccaagttagaacaaattaggtggccactgggtgtggtggtgcatgcctataatcccagtgctgaagcaggaggatcgcttgagcatgggaggttgaggctgcagggagctgtgatcacaccactgcactccagcctgagttacagagtgagactcttatttacaaagaagaaattttttttcactgggaagctgaggtgagaggattgctcaagtccaggagttcaagaccagcctgggcaagatgatgagatctcgtctctgaaaaaaaatacaaaaattagccgggtgtggtggtgcacacctgtggtcccagttactcaagaggctgaggtgagagcatcacttgaacccaggaggttgaggctgcagttagccatgattgcaccactgtactctgccctgggggacagagcaaaaccctgtctcaaaaaaacaaaaaaacaggtacagtggctcacgcctgtaatcccaacactttgggaggccgaggcaggtggatcacctgaggtcaggagttcaagaccagcctggacaacattgtgaaactccatctctactaaaaatacaaaagttagccaggcgtggcggctggcgcctatagtcccagctatttgggaggctgaggcaggagaatcgcttgaacccgggaggcagaggttgcagtgagccgagattgagccactgcattccagcctgggcgacagagggagactccatcaccaaaaaataaataaatatataaaataaaataaaatccagcatttgagcttaagaagtcaaggcagtgagtaaaactgggcagtgggactgtcttcagcccaggcctcgtccggctccagacttagggcccagctgactctccatgtctccatcttgggggccctaggagaagatcaaggcccaacctctccccagtctcctccccaacccgagctgtatccgcccctgtcctgcctcccctccccacgcctctcacccgggtgggcaggctctgaagggctcttccccagtggtctccgactcttgtcctctgctgagacccctgccagaacgtcctcctcctcctcttccatcagcaactcctcctcctccccttcactggctgggctctgcaggggttaggggtcagggacagcggtgggaccctcagctgggtgcccccccgctccctgctaaatcccaccccagccctttggcctaagccgtaagtgccattgccccacatgaccactagagggagggagggagcagagaaggccttaagctaagacctcacatttttttttatttatttgtaatttattttttatttatttatttttgagacggagtctctctctgtcgcccagtctggagtgcagtggtgtgatttcggctcactgcaacttctgcctcctgggttcaagtgactctcctgcctcagcctcctgagtagctggggttacaggcatgcaccaccacatccagctaattttgtattcttagtagagacgggatttctccatgttggtcaggctggtctcaaactcccgacctcaggtgatccacccacctcggcctcccaaagtgctgggattacaggcgtaagccaccgcacccggctcacctcgcattttataatacaagccctgcgcaacctttggtgagcaccattgccatttatgcctagggttccattattggaacgctaagcatatgggagctatttatatcctactgctcaaagtcatcgccaaggtctgattgcaaaaattcaaagaattgcaacctcaggcataaatgggtttaaactctctgaactctatctattcttttatctttttttttttctttgagacacggtctcactctgtcacccaggctggagcgcagtggcacgatcttggctcactgcaacctctgccttccgggttcaagccattctcttgcctcagcctcctgagtagctgggagtacagttgcccaccaccatgcctggctaatttttgtctttttagtatagatgaggttttgccatgttggccaggctggtctcaaactcctgacctcaagtgacccacctgcctcagcctcccaaagtgttggcattacaggtgtgagccaccgtgcccagccaactctattctttttttttttttttttttgagacagagtctcactctgtcgccgaggctggagtgcagtggcatgatctcggctcactacaacctccacctcccgggttcaagtgattttcctgcctcagcctcccgagtagctgggattataggcatgtgccaccacgcccagctaattttttgtatttttagtagagatggggtttcaccgtgttagccaggatggtctcgatcgtctgaccttgtgatttgcccatctcggccacccaaagtgctgggattaaaggcgtgagccaccgtgcccggccgccaagtctattcttatctgtaaaagggcacaatgacctccaactccacggggatggcatcagggtgaaatgaaatcatacgcacaaagcatttagcatacacctagatgctccgttcattgagcgagccagcaccatacataggtggctttcacgtctttcagtaacctttcctcccagtcgggcacagtggcccacgcctgcaatcccagcactttgggaggctgaggcggtggaccacttgaggtcaggagttcgagaccagcctggccaacatggtgaaaccccatctctactaaaaatacaaaaattagccaggcatggtggcgaacacctgcaatcccagctactcaggaggctgaggcaggaggatcacttgaacccgggaggcggagactgcagtgaactgagatcacaccattgtactacagcctgggtgacggagcgagactctgtctacaaaaatacaaattaaaaataacctctcctccagttctgtcctaaactgcccttgtggaggtgacctctctgggtcacatctcactttctgtcctcgtcaccttctcggcagcatctgacccagcacagcctcctacctaccaggacacggtcctcacacaacccccggatcccacgctcgcctggctccctctcacctcccctctcgctgttgctggccccaggctgggttttcaggcctcctccctccacacccctcccaggtggcctcatcccctctcagggctccaaatcctgtctacacctgacactgcccacagtcctgtctccagcccaagcctcgcccggctccagactcagggcccagctgcctctctatgtctccatgtgggggactcacagggtcacactcaacacagccatgctgggccccactgaacccccagatctgcccttcccacatcccccaattttggcagctcgatccacccacttgctcaggactccagcatctgatctatcagcaaatctggcggatacacttccaaaaatacctggaacctgcccacttcttccctgctccatggtcggcctgggccactccatcatccctcacctggaccagctcactcacctctgccctggtccctggatcccaccctaacccccgacagtctagtccccacagcagccaccagagaacgcctgtgagcacctcagtcagatcctgtccttcctctgcctgcaacactccatggctcccaccttcctcccggtcaaagcccaagttctccccataacctacagagccctgcatgacctgccctgtccccttcccatcctccccacctccttctctctcccttactcactcggctccagccacacaggctcctcgctgttcctccaacacaccaggcacggtcgtgccccagggcctttgcagaggctgtttctcagaagtcctcatggcaccctccctccctccccaccttcagttctccgttcaaatgtcaccttctcagtgaagcccccccaaccaccttcttcccccacaactcccacccaaaggcagggatttttgactttttttgccctctgctttatattcagtgcctaaaacaggccttgcacacagttggccactaactgaatacatactgaaagaatggtttcctgtgtcatcttagctaggcaagagtgcctggtaatttaatggaacactgatctaggcattactgcgatggcatttgttacatgtgattcatatctacagtaaggtgactttcagaaaggacattgctcttgaccaggctccatggctggctcacgcctgcaatcccagcactttgggaggcagaggtgggcggatcacctgaggtcaggagttcaagactagcctggccaacatggtgaaaccccatctctactaaaaatacaaaaattaactgggcatggtagtgggcatctgtagtcccagctactcaggaggctgaggcaggagaatcgcctgaacccaagaggcggaggttgcagtgagccaagatcacgccattgcgctccagcctgggcaacaagagcgacactccatctcaaaaaaaaaaaatagacccactcactgagccactgaggactcggcagcctcccgttgagcaccctcacttcctgacgctccatccctcccactcgccttctcccgccaccactgctttccacaggcagttcccaccaaggcaaaggaatcgtgactggctgcggtggctcatgcctgtaatccctgcactttgggataccgaagcgagtggatcacttgaggtcaggagttcgagaccagcctgaccaacatggtgaaaccgcatctctaataaacatgcaaaaatacaaaaatcagctgagcttggtggcgcgcccttgtagtcccagctactctggaggctgacgcagaagaattgcgtgaacccgggaacgggaggttgcagtgagccaagatcacagcactgcactccagcctggacaacagagcgagactccatctcaaaaacagaattatatcttttgtccactatccagaacctccactctttcaacccctctgctgatgcaagtaacagtgatgacctgcttcctgctggcactgaggactgtatccatataagaattcaacagaggccgggcatggtggctcacgcctataatcccagcactttgggaggctgaggcaggtagatcacgaggtcaggagttcaagaccagcctggccaaaatggtgaaaccccgtctccactaaaaataaaaaaattagccaggcctggtggtgggcgcctataattccagctacttggaggctgaggtaggagaatggcttgaatccgggaggcagagtttgcagtgagccaagattgcaccactgcattccagcctgggcgacacagtgagactccatctcaaaaaaaaaaaagaattcaacagaaaaatggcaggaaaacgcttactgctgtcctgcaagagatcagtgatgattacgataaaaagaaactagtgaaggtgtttaagaagaaatttaggccgggcgcgatggctcacgcctataatctcagcactttgggaggccgatgggggtggatcacgaggtcaggagtttgagaacagccggaccaacatggtgaaaccccatttctactaaaaatacaaaaattagccgggtgtggtggtgtgtgcctgtaatcccagctactcaagaggctcaggcaggagaatcgcttgaacctgggaggcagaggttgcagtgagcctagattgtgccactgagctccagcctgggcgacagagcgagactccgtctcaaaaaaaaaaaaaaaaaaaaaaaagaaatttgcaatttgcctgcctgcaatgatactgtaattgagcatccagaatatggataagtcagctgggcttggtggctcacgcctgtaatcccagcattttgggaggcggaggcgggcggatcacctgatgtcaggagttcgagaccagcctggccaacgtggtgaaaccccgtctctactaaaaatataaaaattagccgggtgtggtggtgggcgcctgtaatcccagctactcgcgagactgaggcaggagaatcatttgaacccgggaggcagaggttgcaatgagcagagatcgtggcattgcattccagcctgggagacacagcgagagtctgtctcaaaaaaaaaaaacaaaaaaaaacacaatatggagaagtaattcagctacagagtgaccagtgcaagaacatttgccagttccttgtagacactggactgactaaggaggatcatgtgaagggtcaagggtttttttgccactgcgtcgggcaggttcatgggttttaagtgcttgtggctcactgaagcttaagtgaggatttccttgcaatgagtagaatttcctttctgtcctttgtcacaagtttaaaaacctcacagcttgtataacgtaaccatttgtggtctgcttttaacatggactagtgttaactccttcatgcaataaacttcgtacataaaaaaaagtttatgaaaacatatctacaggcagctgggcgcggtggctcacacttgtaatcccagcactttgggaggccgaggtgggtggatcacgaggtcaggagatcgagatcatcctggctaacacggtgaaaccccgtctctactaaaaatacaaaaattatccgggcgtggtggtgggtgcctgtagtcccagctactcgggaggctgaggcaggagaatggcatgaacccgggaggcagagcttgcagtgagctgagatcgtgccactgtactccagcctgggcgacagagcaagactccgtcttgaaaaaaaaaaaaaacatatctacgaaaagaagaaaggacattactcttgatactacaggtgggcctcatccaatcagttgaaggcgataacagcaaaaacagaaaaaaaaaaaagattctgccacaagactacagcatctgctcctgcctcagtttcctgcctgccctacagattccacacatgggcactggtaccatctccattttggggttttgttgttgttgttttgaaatggagtctcaatctgttgccaggctggaatgcagtggtgtgatctcagctcactgcaacctccgccttgcaggttcaagtgattctcctgcctcagcctcccgagtagctgggactacaggcgtgcaccaccacgcctggctaatttttgtctttttagtagagacggggtttcaccatgttggccaggctggtctggatctcttgacctcgtgaacctgcctgcttcagcctcccaaaatgctgggattacaggcatgagccactgtgcctggcctaccatctccatttcacataagaaaaaaaaaacggccagtgcagtagctcacgcccgcaatcccaacactttgggaagtccaggtgggaggattgctggaggccaggagtttgagaccagcctaggcaacatggtgaaacctcatctcttctaaaaatccaaaaattagccgggtgtggtggcatgcgtctgtagtccagctactagggaggctgaggtgggaggatcgcttgaacccaggaggtgaaggctgtagtgagccaagatgggggcactgcactccagcctgggccacagagtgagaccctgtctcaaaaaaaaagaaaaaaactaaggcacacaaagggtccttggtcaagttcacccggctggtgaacactcagggaacatctattatcatagcatttgaagttcccccagtgcccctctggtccctgccatcatttccagccccctcagccacccatgacaccagcaggtctttcttcttgtctacatgactttgcgtatgccattccatccttctagaaagctcttcccttcaacttgctctgacaaactcctgctcatccctcaaagcccaagctcccatgtcccctctctccgccccagccctggagggatggaggaggcatgtcacgtggtaagggctccatccgtgtttgtatatattactaatacctcctccggagagagctgtgccaggctgggcacccctcattccacagtgacctgggcggcttcctggaggaggctgcagcacgtacctcatcagcagccgtggcaggcgtgtgcagctggtgcagccggagccaggtggccttgtacttgtccagtttctggcctttgtacttgacagaggcccagccacagcccgacttcttggcagggttcaccagcttcttgcagtgggtggcccaggcgctgggtgagttgaaggtctgcccggtctcctgccacatgatccttccgtctggctgcaggtcgcccaggaacttcttcccctgcagtgacagtcagctggctgggcccaggaccaacacccaccatgccctctctcccggggggtcctccccagacctacgctccctcaggcatgtctttacagggcttccaggaacacctctcaggccggctgcagggcctcctcagtgcctgggagtccacacccacaaacctgatcagcctgcaccaagctgcctggcagatatctgcaccccgcccaccatgaccaagaaacccctaagatcggggatagggtctgtctgtcttgatcactgctgtgtctccaggatgcaacactcagcagttgctccattcagaaactcccattcagaaggggaataatgtgctaccattcacaaatcaaacaataatgacaacagtaatagtaataatacagggctgggtgcagtggttcacgcctgtaatcccagcactttgggaggctgaggcgggcggatcacctgaggtcaggagtttgagaccagcctggccaacatggtgaaaccccatctctactaaaaatataaaaattagccaggcgtggtggcgggtgcctgtaatcccagctactcaagaggctaaggcaggagaattgcttgaaccgggaggcagaggttgcagtgagccgagatcatgctactgcattccagcctgggcaacagcgcgagactctgtctcaaaaaaaaaaaaaaaaaaaaaaaaaggccgggcatggtggctcacgcctataatcccagcactttgggagctgaggcaggcggaccacgaggtcaggagttcaagaccagcctggccaatatagtgaaaccccgtctctactaaaactgcaaaaaaaaaaaattagccaggcgtggtggcgcatacctgtagtcccagctactcgggaggctgaggcagaaaatcgcttgaaccgggaggcagaggttgcagtgagccgagatcgagcaactgcattccagcctgggcaaaaaagcgagactctgtctcaaaaaaaaaaaaaaaaaaaaagtactaatacctaccacagataaagtgcttaccatgtggcaggcgcctgctgagggctttattcatttaaccatcccctaattttcccatggtggggaaatattccatttcacggctgggaaaccacaggaaggccggggtgttgcccatctgaccctgcgcgggtggtggctcctctctgagcctcagcttctcctttgtgggatggggtgtttggtaatctacgtcctccccaccagaaggacccatctgtgcctcagattcctctctccacatggggcttgtcccgtaaaaagagctccgggcctcagtgtcccctccacgggagctcctcctgcaggaaaggagctctgggcctcagtttcccctccccacactggggcttgtcctaaagcaagggagctctccaggcctcagtctcccttcctcacaccggggctcttcctgccgccaagggagctccgggcctcagtctcccctcttcatgtcggggctcttcctgcagccaagagagctccgagcctcagtttcccctcctcacactggagctcttcctgcagtcaacggagccccgggcctcagtttcccctcgccacaccggggctcgtctctcagcaagggagctccgggcctcagtgtcccctccctacactgaagcttgtcctgcagcaagggaactccaggcctcagtttccccttcctgcccgagccgcgatgggacgagggaggcggggtgctcaccaggtagtagatggacagcaccccggcgccaggctccagcagcgcgtctttgaggagcacccgcagtgtgaccgcgcgcctggtgagcgcgcccccgggcccgccgcagccccccgccccggccccgccgccgccgcctcctccgctgacgctactgccgccgccgccactgcgtccaccgcccgctcccgcattcggccgctcagggtcctcggcctccgcttcgtcctcgtcctcctccggcgcctcctcgcccgcaccgcccgccggggacagcggctccggagctgcggacagcgagaggctgcagggaggccgctcgccccacggctctgcagccccgcgcccctgcagccccgcgccccgcgcctccgccccgctgggcccgccgtacctgccatggccgcgcctccccgcgcccggagctctagactccggcttcccggcacgtcacgcggccccgccccggggaggggaggggcgccccaaccattggccgtcgccggggtcgggggaagggctcggcgcgctggggtgggcggagaaactgaggcctcggggatgcccacgcgggagagagatcgggaactcagccctctgggaacattcgggaaactgaggcgtgacggggtgttgaccgggagctcattggtgcgaatggggaaactgaggcctcgctgtccagggatagaggttgcaaggtggaagcctggggcgggtgcgcgagtggctcagcctgctgcaaggagaggagaaggtgagacctgcggtcaccgcacttgaggaactcagaggcctcggcctttaggaccaggggagaaactcaggtccaggggaacaatgcggactccaatagggaacagcctcgcgcagacacaggtggagccaaagagcccaagccggcctcagtcgctaaagaattaactcccaccctcccgggcggccctcgactgattccatgattggaccgttgcggagcccgccagccaatgataagagtcccatttatttcaccctcaaccaatcgatagcaagctactggattcccgcaccaaccaatccgtgtcaactatctgattacaccaactcggatttgaccaatgggcagacgtccatgtaaaccaatcagtagaaacccttagttatgagcgcaaaccatcagaggcagggactggactcaccagccaatcagctccgggtataaggccagccgagtccggccctccatacccttgggcggagcaggaggcagggccgggctcgttgcgcgcctgatcagtgcagccccggcctttgtcccctaccctgtttctgcaactacatccccgaccctgtcctgggaccttcgtcccggagcccaggctctgggatttccctcagtccctggcagggttgaaagtccgggatggggacttcctaaagctccgggacgccgtgggatgggctcaagtgcgggtggctttgcccagaccgcagtcgggaagtgggaactggacagtaggggtgcgggggaggctctccagggtgctcgggaatgttctcaggaagaagacttgacatagagcaagagctgggtacatgtgaactattgttgtccagcccaggcaccctttaggggccccaccctgactgtccagccaacaacgggcatccccaaggcctgcagactcagcatagcccaaaccggcctcagtttatttccccaactccttacgcactttctctttggctttttttccgtcccctgccttccaaaaccctgagccacacctccagcctcttgcacccaaatcctggccatcgcagtgagtctcaggcctccaaactcatgccccaccctgtcggtcttccaccattgccccagagggctctttctaaaatgcacctattaccacctccctcccatattattattttgttttcttttcttttcttttttctttttttttttttttttttttttttttttttgagacggagtctcgctctgtcacccaggccggagtgtagtggcaagatcttggctcgctacaacctctgcctaccaggttcaagcgattctcctgcctcagcctcccaattagctgggactgcagatgcacatcaccacacccagctaatttttgtatttttagtagagaaggggtttcaccatgtttgccaggctggtctcgaactcccaacctcaggtgatccacctgcctcagcctcccaaagtgctgggattacaggtgtgagccactgcgcccagcctattttcttttcttttcgagacagggccttgctctatctcccaggctggagtgcattggtgtaatcatggctcactgcagccttggcctcctggactcaaatgatcctcttgcctcagcctccagagtagctgagacaacaggcgtgaccagcatgcctggctaatttttaattttcttgtaaaagaaggggatctcactatgttgcccatgctggtctccaagtcctggccttaagcaatcttcccacttgggctcccaaagtgtttggattacaggcgtgagccaccgcaccctgccctcctctcatgctgtaaatccttctgtcgctccacattgccttagacaaatacaataaaaactaaccaccctggctgggcacagtggctcacgcctgtaatcccagcactttgggatcacttgaggtcagaagctgaagaccagcctgaccaacatggtgaaaccccatctctaataaaaacaaaaaaattagccgggggtggtggcaggcacctgtaatcccagctactccagaggctgaggcaggaaaatcgcttgaacccgggaggcggaggttgcagtgagccgaaatcatgccactgcactccagcctgggcaaaaggagcaaaaccctgtctgaaaaaacaaacaaacaaaaaaacgaaacaaaaatcaactctctgaccttacttagtatagctgatactatcaactttatcagacagttcagtggatgaacacattgccacagtcccacggcctttctgtgatttctagaacacctgttctgctatgtatacaaagtctagccctggtaactactaaggaaattgaatttgtaatttaaaaactcccaaaaaagcaatctccagacccagatggtttcactaaggaattctgccaaaggttcaaagaagaattaacaccaatttcacatcatctcttccagaaaattgaaggggacacttccctgttcattttatggaactatgaccctgataccaaaaccagataaagacggtacaaagaaagcaagctacaccccatatccctcatgaagacgtgcaaaaatccttaacaaaatattacaaagtagaatttaacaatatataaagtgaattatacaccatgacaagtggggtttactccagggacccaagactgattcagtattcaaaattaatcaattgtccaccatattaaacaggctgtggtaggcagaataatggtctcttaaagatatccacgccctaattcccagaatctgtgaatacgttaggatacgtggcaaagggatttgaagattaaagatagacgccaggcacagtggcacacacctgtaaccccagcactttgggaggcctagactggaggatcacttgcacccaggagttcaagactagcctgagggccgggcacggtggcttatgcctgtaatcccagcactttgggaggtcgaggcaggtggatcacaaggtcaggagattaagaccatcctggctaacacagtgaaactccatctctactaaaataaaaatacaaacaaattagctgggcatggtggcacgtgcctataatcccagctactcgggaggctgaggcaggagaattgcttgaacctgggaggcagaggttgcagtaagccgagatcgctccactgcactccagcctgggtgacagagtaagactctgtctcaaaaaaaaaaaaaaaaaaaaaaaaaaaaaaagaccagcctgggcaacatagcaagaacctgtctctagtaagtgtaaaaattagctgggcgtggtggcaggcacctgtaatcccagctacttgggaggctgagccaggcgaatggcatgaacctgggaggcggagcttgcagtgagccgagatcacgccactgcactccagcctgggctacagagcgagagtctgtctcaaaaaaaagaaaaaaaaaaattagccaggtgtggtggcatgcaactgtagtaccacctactctggaggctgaggctggaggatcacttgagcctgtaaggtcgaggctacagtgagtcatgatcgccccactgtactccagcctaggcaacatagtgagaactcatccttaaaaaaggaaaataaattagctgggtgtggtggtgcccacctatagtcccagctcttcgggtggctgaggcaggaggaccgcttgagattgggaggtcagggctgcagtgaactatgatcgtgccactgcactccagcatcgacaacagaatgagacaccgtctaaaaaagaaaaattgcagatgaaattaaagttgctagtcagctgactttaaaatagggagagtagcgtggattatccaggtgggcccaatgtaatcattagggtccatcaaagtaagagaaagggccaggtgtggtggctcatgcctgtaatctcagcactttgggaggctgaggcgggcagaaaacttggggtcaggagttcgagaccagcctgggccaacatggggaaacctcgtctctactacaaatacaaaaattagccaggcgtggtggcggtcacctgcaatccacgctagtcaggagactgagcttggactcagtctctgaacccgggaggcagcgcagtctcttgaacccgggaggcagaggtcgcagtgagccaagatcataccactttactccagcctgggcaacagagtgaaactctgtctcaaaataggaaaaatagataaataaataaataaagagacagaccatgtctctgtctttgcagatatagcgaagattattctcccattcaagtagacttatacattctctctgttctcagttccacaccggagaggcggggatttccctaggatcactggacctgctgggatcagcctctgcccagccctggcaggggagggagttgacgggctgacacaggaaactcccctgaaacctgtttctcagcttcccggcccagctggggcacccactggaaggagaggccaggcggaagaccctggctccgtcatggcctctgccctgaggccaccccgtgtccccaagcctaagggtgtcctgccttcacactactatgagagctttctagagaagaaggggccctgtgaccgggtaaggtggggaggcgggggctggccctgctgggccaccgtggggagctgcggcacctctctgagtccctgtctccccactcgccaagggggggcggggtgggtgctggatggggcaggacacgtgctgggggactggggtgggttctggccatctgcctctctgtgcgtctatctctgtctccgtgtgtctttgaatttggtttctttttctctttctctctccctggccccgtctgtctctcccgatgtctgtctcagtctccctctctctttgtctcaatctttgcttttgtctctcgttcactctcttgaatacaaacaagatcagggacttcctccaggaaatggggagtcctctgactcccgagcttcctcccgctcccagcccaggaaaaactccgtgaacctcagctgctggggcgaaggccaggacaggtgacatgtgaggacagtaagagctagcgggggccacattccacaggacagatagttgccatggacagtgcgtgcatgtgtgtgtgtgtgtgtgcttatgtctccctcagaataaagtcccagcccctccgttccccgtgaggccctatctctccttcccaatgccgcatattcattttctttctttctttttgttagagacagagttgctctgtcacccaggctagagtgcaggggcacgatcatggctcactgtagcctcaaactcctgggctcaagtgaacctcccgccccagcctcctgagtagctgggaccacaggcatgcactgcctcttctggcttttattttatttatttatttttgagactgagtctcactctgtcacccaggctgcagtgcagtggcaccatctcggctcactgcaacctccacctcccaggttcaaacgattaagcgattctcgtgcctcagcctcccgagtagctgggattacaggtacgcaccaccacacctaatttttgtatttttagtaaagacagtgtttcattttgttggcccggctggtcttgaactcttgacctcaggtgatccacctgtctcggcctctctaaatgctgggattacaggcatgagccaccgcacccagccttttttttttttttttgaagatggggtcttgctggccaggcgcagtgggtcacacctgtaatcccagcacttagggaggctgaggcaggtggatcacctgaagtcaggagtttgagaccagcctggccaatatggtgaaaccccgtctctactaaaaatacaaagattagccgggcgtggtggtgcgtgcctgtgatcccagctactctggaggctgaggcaggagaatcacttgaacctgggaggcagaggttgcagtgagccaagatcgtgccactgcactccagcctgggcaacagagcaagactccgtctcaaaaaaaaaaaaaagatggggtcttgctatgttgcccaggctggtctcaaactcctggccttaagtgatcctcctgtctcagcctcccaaactgctgggattagaggtgtgagccaccatgactgcctcattttctaatacagatcaaaacaaacacccccagctcctccctgcccatgtccccgcctctgcccctgaggttcccttacctgtagtggagtagactttccttctacctccatacatccaaatcctccccaaccaacaaaccctttagagccagtagatcactgcagttaagaaagataatgggggaggccgggcttgtggctcacgcctgtaatcccagcactttgggaggccgaggcaggcggatc

SEQ ID NO: 2 - DNA, 12332 bp, Homo sapien
cacccgtccgttctccatctttcccgccttcctcaaccctcgggtgaccttccttcttcatcctgcggagccccggggctgagcggagcgtctcgacagaggctggagcgggtggggaggcgcggggcgagccggggggttccagacgcgcctccaccgccgggcagtgggcaggtatggctgagggcgtgtgagcgccgagcgctaagggccgccgccaccatgccagggggcgcaggcgccgccaggctctgcttgctggcgtttgccctgcagcccctccggccgcgggcggcgcgggagcctggatggacaagtaagtggccaggcgcggggggatggaggctgggtggcccggagacctgggagtagccttgcgggtccggagcgctgggaccagcagacccctgcgcctcccgcaactccgcggggcctgcagcaccccgccgtccccagcctgggagcccgggctttgttcccacgttctgcgccctgggaggtggcagaggtcggggaaacccggcgcagccagaaaacagccggtccgctcactggctagccttcccttctcgccttctccttcctctgtttttctgcttttggcttctctttccgccgttctcggggcttatcctcctccgttttctcacggtccctcgtgtccgctccgcctctctctctgtctttctctctaccgcccgctgcactcgccaacgccgagcatcccgagcgccctgcccgtgtggcctgggagcggcttcctgggaccaggctcggtgcctgccacactggtggggtaggacataaaatgcccgcggcagactgtggtagccttggctaggggatggctcgctgggtatctgcagccacacacttcggatccccgagctggcaggagccctactgaaggccaagtcaaacgcacccatttcacagatggggaaaccgaggcccacaaaagggaaaggacttgcccaaggccacgccacgggttgaggtccgcggtggcactggaaaccagggctctctttccacgccaacccgacggccgccttctttggtcctcagtttccccttctgtgaagcgaaggggtctgactcgatgtttccagctaagatgccgggtgatgtccgtgtttctcaggactagtttcccagacaccaatcccctccccggctccatccctcgggggctataagcagatttcgcggaaggcttggtcccggggggcggtgcccgggttctctcattatgaccggagaaggcttagccctggctccaccgctgcagacgggctgggctgactccagactgctgcttgggggaccaacagtcagcgttttcaaatagagcgagcaccggcggagcgagggtgggctggctggacccccgggccgcctcaaacccagaggctgagagctcttccgacagttcggaacttccaggggccgaggtcgggcggtcctcccaaagggctcaaaggaaccgccctttgagctgttgttccgaaggggaaactgaggcacagaggaggttctagggtagcaccaggcctgtgtcagtgcttagtgcaggagaaaagcatgaagaaagacaaggaaagctagttactgctcctagcacaggcgccttctctgagttttgagtccttggagaacacttgctgtagaatatctgggaaataacgaaaagtgtaaaagaaaatgatctgcaacccccaaatccacagttgctgttgatattttgttttttttcccctccacattctttgtgtgttcctatggatatatattgataaaattggaaccatacccataagtacagtttcgtgtcttgcgtttttcacttcacaccatgagcgttttccacatcatcaaattctctgtaaaacatgattttaatgactctatacaaagttttcaaaagttaaaaacacgactcatacaaatgtggccaagatttattcaactcattaatgaggtagcaaacaggagagtaaagctgattcagggagcattagaaaggggtgatacaagcattggagaaagaatgttgaaatcatgtggcccagggcagatgcagaaatggtggatgccccatgaagcaaaccataattcttggttatctttcttttttaatttccttccttcattccttcttttctttctttttttttttttcagagtctctatctgttgcccaggctggcatgcagtggcacgatctgggctcactgcagtctctgcttcctgggttcaagctattctcctgcctcagcctcctgagtagctgggcttattggcatgtgccaccacacccggctagtttttgtatttttagtagagacggggtttcaccatgttggccaggctagtctcaaattcctgacctcaggtgatccgcccgcctcggcctcctaaagtgctaggattacaggcgtgagccattgtgcctggccaggttatctttttactatgctgaaatcacttacatctctgtcagacagaattctatagatatatatagattatataacttcacagagtgtagcttttaatcaatggtaaataaaaagtcaatggtacattcccctagataatgcagtaatccatgggtgagtctgttaaacaatgctctgatacaacattgagaagacatcttgcttgctcttgccttatttccaagttttggagaccttttcttaacatgtactatgttcctcttttggtgagattttagattgctttcactatttttttacaatcgtagatatcatttaattccattaaatgctccattaaatattatagaattcctttttgtttaaaataatatagacttatcagagccaccagggcaagagcgatgcttgtcttttttttatttctgagatggagtcttgctctgtcactcaggctggagtgcactggcgcaatcttggcctcccagattcaagggattctcgtgcctcagcctcctgagtagctgggattacaggcatgcgccaccacacccagctaattttcatatttttagtagagacagggtttcaccttgttggccaggctagtctcaaactcctgacttcaggtgatccgcccacctcggacctccaaagtgctgagattacaggttgtgagccaccgttcctgtcctgcagtatgcttgtcttgttcctccatgaatattaagcacctattcatagcatagtacttggcacatagttaagtactcagaaaatatttgataaatatatgaatgcattgtttctaatatttgcctgtctgatgaattggtgttggtccaataagattatttttaaaatctatgttgactgcaagtgcattatatcggtattctgaagagaatgttaataattactcataatcaccactctaacagaacaactatggccatctttttatcattcatattctgtatgattgatgtagttagtttagacagaatagattttggagtcctcagccccattcccaggaacactacggagaccagtctgtttaggtgtcgggaaattaccattttgttaagatagtctgccgccagtatttgagttctgcagcgccctgaacaaatctctcctatagtttaaattctctttcttgcaaaacaggactcctcccagtctctagtaaaaatacaaaaaaattagccgggtgtggtggcgggtgcctgtagtcccagctactcgggaggctgaggcaggagaatggcatgaacccggaaggcggagcttgcagtgagccgagatcacaccactgcactccagcctgggcgacaaagcgagactccgtctcaaaagaaaaaaaaaacaggactcctacttcctacttcccaggggttgccttgagcatgaaggagaactggtttgggagagtgatttgggaagtagaaagtggaatacaaatgtaaacttgccattaggaagctccaattaatgtaacttgatgcagtgatgctctgcggagtaggaggcaatttcatattgactcttcacaataaagctgtgagatgggcaggtagcatctttgtcttcattttacaggcaagaaaactaaagctccatgggagcagtattcatgggcttgacctccagaatatgcccagaatcccaccgcttcattcctctccactgatgtcattctaatctgagccaccatcatctctcaccagggctccagcatatctctagcctggccttcctgcttctgctctcactctcgccgctctgcctcaccccacccccattctccaccacgcaggcagagtgatcttttttaaacttaacacagatcatattgctctgtatttaaaacacccagtgccttccaagtctatttataagaaaatccagacactctccgtggtctctgcattatcagacccatggctgtcttgctgaccacatctcataccaacttcctctttcatttactagctacccctaccttatgcttgttccttcaacaggccaagttcacttctgctcaggcagggccattgcacttgctgtttcctctacctggggcactcttcccccacgtttttgcatggctgccttctggctcctcaggactcaaatgccatctatgctgatcatcctgtttcaaataggcacctcctgatagatgtctctttactccatgaccccaacttattttattcagggtacttagcaccatgtgagaacatttgttcattgtctgtctcccacctttacaagtacagagaccttatatgtcctatttaccacaatatcaccgacacctagagtgcctagttcctaggaagtgccaagagcctgaaatccagcaagtcttctaatgacccagtgcaggggcagctcacagaaagtgcatgtgtggcttagctggggtatagaggtctgggattccaatggttttgcatcttgtattggcaggaggaagtgaggaaggcagccccaagctgcagcatgaacttatcatacctcagtggaagacttcagaaagccccgtgagagaaaaggtaagactcaaaagacctcatttacactggcaggagttgacaactgaggtttgggctacctactcaactttcttagaatcccagtcatcaccattagttctgtttctggcccactctgtcctctgggtgcccattttggagatcacagatgggactttccttccttgtatgacaaacttctagaacacttcccaatgctattagttgaggaaatgaaaattcacattaatgctgacacaagctaagtgcagatgtgttggtgtcacagaaatcacttagtcttgattggaattcattaaatattgtcattgttatttttgctctgcataatacatacttcattttcttgaaggaataatgtacttggagagaaaaaagataataatataaactataaactattttaataagacgcagcgtagagacctagtactggggaatgtatcttaaaatccagtaggctcccctggccagaacaccaggaaaacacataggctttatcaaagagattgggaagaaaacaaaaaacactgtcctgttcttgcagagaggacctgagcatttaggatattctttgtggttctggtttttgttttttgtttttttgtttttgtttttttgtttgtttgtttgttttgacagagtctcactctgtcgcacaggctggagtgcagtgacatgatctcggctcactgtgagctccgcctggcaggttcaagcgattctcatgccttagcttccggagtagctgagattacatgtgtgtgctgcgaagccaggctaatttttgtatttttagtagagatgggttttcaccatgttgtccagggtggtctcgaactcctgacctcaagtgatccgcccacgtagtcctctcaaagtgttgggattacaggcgtcagccactgtggcccactgtggttttggtttttccagcaagtgagacgtgaaagagcaagaaaggaagatgcggttgttgtgtgccagtaaccagctatgtgacctgccacttgcgaagtggtagattttcttcatttataaaatagtgcttagagagaataaggagaaaagaaagctggggagaggggttttttctaagatctctttgggttaaaatgatttgtgatttattgggcaacatataggagcaagattatagcaggaaagagatgtgtcaggaaagacttcagacattgtggctgttgaatctggaaagataaatggaaaggagcaatgtccaggatccttgaaactctggccaggataatacagacatgtccaaaaaggctccaacttggatttaccaagggaacctaacagtgtaaattttaggacagaccaagtgcgatggctcaagcctgtaatcccagcactttgggaggctgaggcaggaggatcatttgaggccaggaatttaagaccagcctggggcaccatactgagatcctatctctacaaaaaaaaaaaaaaaaaaaaaagaaaattagctagacctaggggtgtgtgtctgtagtcccagctactctgaaggctgaggtgggacgatcgcctgagcccaggagtttgaggttatagtaagatatagtcgcatcagcatcactgtcctccagtctgagtgacaatgcaagaccttgtctcaaaaaaaaaaaaaaaaaaaaaatcaggacaaataaaagcaagtaacattttgtcctaaaggcagtaaacgcatggaattcatttcatcaaaaagtaggagaggctgaaaatagcttcaggaaaagtctcgacaaatttaatggatgtcatcctagagcaattacttttaacaattaagatcttggcgtattgcaacctattcataccccctgaggaatggacctgctactttttatagaggcttctttgttctctccagcattttgaatgccggtgcatcctcatcgaatggccctgtagaaacaaagtcactaggcaccatgactcctgttctttcgcttcccaaaccattgttctgctccattcatatgggtcattgtattctgtatgaatattcacgacatacgtgtccctggtcacctgatacatctacttcttttccatattgaaccatacatctagatggaatcgttcgcaatggagtacgcaagtagtacttagtacgcgtctaggatattcaacattgggcctctcattctcatttatatattaattcactcattaaacatttttttcttctacttatttgctactatcactgacttaaagctcacattcattaaacattaactgaatacttatactgtatactaaatattatactagatcttagggggaatgcaaatataggacagatttccaataccctatggagctaaagatctatttaatctagactgaaggggaaagaatttttaacccatccctaggagaggtataaatagtgggtcagcttactgtacttcataggagaggagagctgatggtgcctcttcttaatacagagtggagtttcatcagaaaagctcatcagtagagccggacagaaaagcttcatagatccttaaaatgcagtttcattgttttgcttgaaatgccccatagaaaaagggaacatccttttttaaatatcagtgcctgagcaccttccagaatagagagaattatttttggatcacccacataaaaataaagattactactcctggcggggcatggtggctcacgccctgtaatcccagcaccttgagaggccgagatgggtggatcacctgaggtcaggagttcaagaccagcctggccaacatggagaaaccctgtctactaaaattacaaagattagccaggcgcagtggtgcacacctgtaatcccagctacttgggaggctgagcatgagaatggcttgaaccctggagatggagtttgcagtgagccaagattgggtcactgcactgcagcctgggtgacagagcgagactctgtttaaaaaaaaaaaaaagattactattcctgctgcagcttgtgtctctttgggggaggggaagatagtgctttgatttggggcagtattcattttctgtgggggcagtcacatggttacctacctcttggatgagggaattgctgtagctctgttgctgtgtcgtctttctttctttcttttttattttttttttttgtttagacggagtttcgctcttgttgcctaggctggagtgcaatggcgtgatctcagcttaccgcaacctctgcctcctgggttcaagcgattcttctgcctcagcctcccaagtagctgggattacaggcatgcgccaccatgcctggctaattttgtatttttagtagagatggggtttctccatgttggtcaggctggtctggaactcctgatctccagggatccgcccaccttggcctcccaaagtgttgggattacaggcgtgagccaccgtgcccggtctgtgtggtctttcttaaatgcccacttggagctggggtccctgatgctcagtgtgattgggcagggcactgcctcaaaaactccataaagtggcaaaggatctgcaaccagaataggtgttggcagagctgaatcagggcatgacaaacagagaagtgaatctcttagtgaaagttattggtcaaacatctccccagcttcctacttcggtgggtttgaaatgttccttcttgagatgaagtaatacgattaattaggcaatggccagcgttgcccaagagcctttgatcggaatgttgagatctcatcagagcccttggtgacctcaaagtctcagaaatgcccaaatcctaatgcagagtggggtttgcagcgaggaaggggaatgtgcttagacgaggtaggcttctaaccagaggtggcagaacaggtgacctactttctcagacatgcaagaagtaagctttgaggtcaaccttagaagggctagaagctctactctagcaatgattttgtggattgaaagggacttcaagaatttatctgctggatgaggtggctcacatttgtaataccaacactttgggaggctgagttgggaggatcacatgagcccaggagttcaagatcagctttggaaacatggtaataccccagtatctacaaaaaatttaaaaatactagcccagtgtggtggcatgcacctgtggtcccagctactcagtatgcttgagcctgggaggttgaggctgcagtgagccgtgattgtgccactgcactccagcctgcacaacaaagcaagaccccgtctcaaaaaaagttgtcagttccttagtcccaaaatagagagcttatgtttaaaacactccaaagaatctgttctgttttaaatatgtaaatatccttttttaaaaaaataatttatttcttcgaaaaaagttcagtagccttaagttgaattgttgaagcgtggagatttattatgacttggtttttaaatttctttgaaattctccacaataataaagtaaaaagagattaataaaaagttcttttcttaaactgtgaaagcaattgtaaacatgtggaaagatgtgcaaaagaaaacaaaattaactcatgatcccataactatggtaatggttaggcttatttctctctacatttttccctttgcgaagtgtatttaaataaaatattcagtattgtattttgagctttatgactaatgattattgtgtacattttgtcagtaatttaacaactacttaaagttgctgcttttaatgatcattcagtgttctgtcatatgaatggatcatcatttatttaaccattctctaacaggtatatttaggacagttaggttacatttcattattcattactttttttttttttttttgagacagagtctcgctctgtcgctcaggctggagtgcagtggcatgctctcggctcactgcaacctccgcctcccaggttcaagcgattctcctgcctcagcctcctgaatagctagaactataggtgtgcaccaccacgcccagctaattttatatttttagtagagacggggtttcaccatgttggtcaggctggttttgaactcctgacctcaagtggtccacccgtctcggcctcccaaagtgctgggattacaggcatgagccactgcgcctggcccattattcattattataagtaataaatgtccttatgtgcaaacctttgcctgtgcctccatttattcctttcaaacagcctcacattcctgagtctaaacatttttttttttttttgagagagagtgtctcgctctgtcacccaggctggagtgcagtggcgcaatctcagctcactgcaaccttcgcctcccaggttcaagcaattctcctgcctcagcctcccgagtagctaggatcacaggtgcccaccaccatgcctggctaattttgtatttttggtagagacggggtttcaccgtgttggccaggctggtctcaaactcctgatctgcctgcctcggcctcccaaagtgctgggattacaggcgtgagccactgtgcccggccgagtctaaacatttttaaactctcagtgcatactgtcatgttatctttcagagagttgccgtcagtttaaattctcagtggtagggattgcgagtgcccagtttacagtgggcattgtgcattgtgatttagagttttagataacctctggcactttgatttttttcaaggtatcttattatttttaatttgtttttctggacgtggggaggtggtttattagcgatgtcgaacatagtttttgtgcttatcaaccactggtatatgttaagtgatccgttctggatatgtagcacctgtggccactaccaaactgcttatgtgtaaaatgtatctactttttggcctataaaaccttaatttgaggatctcttagttgcttcctctgagatgattggggttttccaaacggagagccaaaatgaaataagaacccactacgaagaggatcccctagtattttacaagataataggcaatatgtatcatggcttgccgtgtgccaggcactgtgatacattatttatgctcattatctcactcaatccttacaagatccccatcaaattgactattactatctctgtatcatacatgaagaaactgagatgtggggaggctcagcaacatgtccgacttcacacagctgcaggtgtcagagccggtgcttgaatccagatctgactctgcaggacatttactgctggagattgtgttttccagtgtttcccttcaccgcaccacatacatacacttacaccacattgcagcctggagtttcttctctatgcctttcaggagaaagcagatgggggaaggatttgggtcattctgggattgaggtcattttacatgtgggctggaaatgcaattgacctttgctcattcacttcctgtggatcaatgttggagcgctgtgctagatcctgtgcccgacccagggagcctggtgccggcttttaggaactgacattgttttgttgttgcttttagcatccactcaaagctgagctcagggtaatggctgaggggcgagaactgatcctggacctggagaagaatgagtaagtggactcctcctttgtctaaaatgaaacaaataacttctgtgtcaacgccagacgcaggtgtcgctgttctggaaggaagcagtcaatggagtgaccccaagctctcagtccttggtttctttcaggcagcatcttgcaaagccagagcctttccacagcctcttgactcgatgtgagattgctggactgctaaatgtgttgctaaaatttccttaggcagtatttcaggggcccctggagttcactgcgggcacacagaggtctgtgtatgtgtgagattaagggagtggatggaccagaggtctttggcagctgccttactagcgccagctagtgtgtggcaggaaatgaaggagattagaggaaaacagcagagaggagcgagcaaagcagggtgtgctggggcttggagcctcagactcagattgttccatgtgttctggttcagccgcatctgagattttgtcaacagggcatcgtcaacagtctcctggctacatcgggcccggctcttccatcttcttaacctcattcatcttgggtggtagcctggctcagaggcacttgcacattgatttgccatcagatgcagtcatatctggattcatgtaatggaggaggtgaatgggcacgatgcatggctatgtctgtggctcattctttggccattccccatctacttagccatgaagagctctccttacttggccggggg

SEQ ID NO: 3 - DNA, 11401 bp, Homo sapien
agagagagttgtcagcagtaaaaatgagcaggcagctcctcgctccctgggcctaggtgggagcttctagggtggttctcagtttattcattccccaggtggaacggaatccaggtggggataaagagtaaggtgggctgttgtaggagtagacaggataactgtaaacacaggcctgtaaaggacttccatgatgctggcacagtgcagagtggctgggaaaggatggtgctgcatgtggtactcactgtgtcaccctagaaaatgtaagtttgagacagtcctttctttacatcaggggtctgcaaactataccccatggtcacatccagcctatcctgtgtttttgcaaacaaaattttactggaacacagccaggcccattggtttctgtattatccaggcttctgtattatatatacaggtgtctgtattattctgagccaccactgcacagttgaagagttgtagcagagactatggggccgcaaagcctaatccggcctttgcagaaaagatttgctgactcctgcttcagaatactctggacaacagaattcgctccttaaattatggtggtctcattgggcagttctttgaagagaagattaatatttttttgaaagacaatgaaatctggccctgatgttctaataaatattactaaatgaatggaaatgctgcaacgctgtctgtgccgagagaccaatttagaaacaggaggcctctataatgagaaactcctggattaacaccttggaaaggtctaagttacagtgtcacactgaatctaactctagaaagcagtggtaacagattctcttctggtgagtggcagttttaaggaagcctaagaatgtccacaagctgtggtgaaagggaaatggtggatttcttccctgtatcagggctggtacacacctctggccaaacaaataccccaggttgttttacttggctgttcttgttctttcttgcttagatattctcatgggatggggtggaggaaggacgtgaagattttgaatcaaaataacatgtatagtgggtacctaagataaattagagaggacccagattctgtgtaacaatggcagtgtacaggacatgcccatcatttttaaatgtaatttgcagttgtagcaggttttctctttacactgtgaagctttccttcatcattgcagctcagagagatctatctttttgaggcaggaatggtaaataggaggtattcatactaaaatgtcctctttctggtacccatggcagatatttctaatggaacacagctttctttcctgtgcttggttagaaatgtctgattacggccaggcgcagtggctcacgcctgtaatcccagcactttgggaggccaaggcagatggatcacttgaggtcaggagtttgagacaagcctgaccaacatggtgaaaccccatcattactaaaaatacaaaaattagctggccatggtggcgagcacctgtaatcccagctactcaggaggctgaggcaggagaatcgcttgaacccgggaggcggaggttgtaagccgagatcacgccactgcactccagcctgggcaacaagagcgagactctgtctcaaaaaaaaaaaaaaaagaaagaaatgtgattgaatcgatgcagtctcataattcttctcattcttctcactgtagaaggcactgccagtggatctgagtggtgtgcaagatgaagcctatttgccagtgtcttatggtcctcctcgttggcactcatgtcattcacatgacctcccactgtggttatttctgtgcacgttttcccggcaggttttctcaaccatttcagttctatactccttaagtacagggtctgtcactcagcatctgccacagttatttctggccctctctgttttaattgaagctcctctaggctagaaccaagatctcacacttctttgtgtcctacatagtgctaagcacaatgccttgcccatagcaggcattcagcagcaattcgatgattgttgattgaccacatgtagggaagcctcgtgagatctgtgtaatggtggcttcatgttggggtgatgaccacggtgaggattggatcagtcctcctaagccccagtgggagtttgccagaggccatgtaattcgaaggacaggagaataagatgtgcttcaagggttagaggaaggcaattctactccgtgcataattattgcatgcctactgtgtgtgctgcgctgagctagtagctgtggatatgaagatggatgttgacaggtcctaccctccaaagctcttactgtggtggggaagacaattgcataaaaatgatggctcatagaagacagaagaaaataagagcaaattcaaagacaagtaatggggcgcaggaagcatcctgtgagaggttctgggatctcacatggttctgcttgtcccatttagtttcagaagaatcgacgagaccaggacgccaccaaacacaagctcatagagatcgccaactatgttgataaggtgagaccaggtgtgtactttgtgggaaaggtgccaggtgccagcacttccaagggcactggagctgccttctgctggattggctgccccagccatcttctgaaagggaatgagcagtgccatagaggcccagggcggtcatgacagagccctgaactacgtacccttaggcaagtaactcattttctttgtgttgcatttttttttcttttgttctgttttcagcttataaatagaaaggctgtcgtaaatcaatgtgtggttttttttttgtatttttattttcctggtggaattttaaaaaatgaaatcttatgccaatatctactataaaagttagatgaaaacagactgctctaagtgggagctggggtgaggacccagaacactgtccttctgaccccttcctcttacccctgcagtggctcccgagcagcttggggcatggaagagcccagtttaagaatcctttaaggttctttaaggttccttccagatacaaagcccagggattctctgacttaagagggaattgaggtaggtcagggtgggaaagacacacagccttaaaagttgagaagtgggctgtttgagaagtgggttgcttgagaagcggattgtctgagaagtgggttgcttggggctaatctataaagtctccatctgtaaagttatcctaaaattatgtcttgtctcttaggaaggatgtgcagtggttaactttcctaggtcaggaccttttacaagatgctcttcggaaatacctacatttttgaattttactagaacgggctggtctgggacttggaagtacattgtgtatatgaaagaagatatttgttatagtacaaaatgcagaataggtaacctagaatgacagtagcctcttggtaggctagtagtatatagtttttaaaagtagtttttcatgtgtttgggatcaaaagtctctttgagaatctggtaacgtttattgcacaattttagaatactcataacattgatgaagcttaactttgggcctgctagggattcatgaattccaggtctaaagggaaaatcattttttcctaaacactagagaatataggagatcacttaaaatatgttttagggattaataggcaaatgtattagttctgaagtcatcagatggcagtttccatgcccatggtttttttctgccctagatggctctggaaacaaaggtcagtggtcagtgacaggtgaaagtcaaacactggcatttcctggaaggacagactctagggacacagtccagtcctccctctagctcctgactcactcaagaataacatttaaataatcctacaacccaaacatttgacatctgggaaaacaagggaagcttgtttccctggggagaatatgggaggctgactctgctttcccccatgtgacatctattgtttggagacctggcaggttcggacttggctgggtatccccttctgtggggtatgtgatggaaccaagggcgctggtgacaagtgaagggagaagagaggcaccagcaagccccagtccttactgaaagcctaacgcttgggtggcccatgcatcctgtgcagccgtcttggctctctcctcgcggctggtgttagtcactcctggcgggtaagggaagccacgcccacttctctggagcttgctgacctagctacttgaactgaactattgttgaactaaaactggaatgaattggactcgtgctgagtcatgaacccaatccaaaatgtttttctgtaactgtgaaaaaaagccaagtttacttccttcaaaagctccctagtaaagcaaattcaaattggaatctgaaccttttattttctgtaacgattgaactggcacaaaacagaaaaatcaaaatttctgttgaaataaactgatatttcactgaatctggagcccatcttgaccagcgtttcttggagcgagtggattatctggatgtgtaggtactgcagcactgaagtagtaaagggtcacaaataggctctgaggttgtaatttgggccttcatcctggctccaccatcttcttgctgagactttgggcaagttccttaacttctctaagcctcagtgcctagtacgtaaaaagtggtggaaaaatgttggtgctatgattattcttttcagctggggcagtacctaccaattttggataaagatggtatctcctgctcattatgtcctctccatacatggggctttttattaagtcactggctcagtatttgtagggtggacccatcaaagaacccgttgtatccacaccttccagtggtttagctttaaagaaaaccctcctcctgcttatatttgtatgaggtgaaaaatgccagatcataaagattagatgtagctctagcctcgaggaggtcgagtcagatcttgggtatagaatttcaggatctctggtttggacaaaaccctgaagattaccaagaacgtctgtagtctattgcttgcaacctgcttattccatccttgacaaaacctgagactatccagggatggggaagaaaatttgaagagtaagcatatctgtgcacttttatgtcatttatactcatttacttccaaaatgagtgggagacattttataataaaatatccatgtattaatataatttggtatatccatacgaaagaatattattcagcaataaagagaaatcataaacgaatacactctaacacatggatacatctcaaaaacattatggtaagtgagagaagccagacacacaaaaccacatattgtaaaacaaatgtccagaaaaggcagaatagaaacaaagtagatgcacggttgcctgggctgagggtgagaatgggaaatgactatcaatagacatgagggatctcaccgatgtgatgaaaatattctaacactggatgatggcgatggctttattttatttttatttttttttgagacggagtttcgcccgtggcccaggctggagtgcaatggcacaatcttggctcaccgcaacccctgcctcccgggttcaagtgattctcctgcctcagcctcctgagtagctgggattacaggcatgcgccaccacgcccagctaattttgtatttttagtagagatggggtttctccatgttggtcaggctggtctcgaactcccgacctcatgtgatccatccaccttagcctcccagagtgctgggattacaggtgtgagccaccacgcttggctggtgatggctttaaaacttggtaaatttaccaaaaagcattgagctgtacacttaaaatagatgggtattatggtatgcaaattatacctcaatgaagtggctttaaaaaatctatatacaagagaactttttagatacccataagaaagataaggctcacataaggaattgggagaaaaaaattgtaccagacagcctggccaagggcactgattacagaagacagcaaagctcagctctgagctatctcatgaccagctttgtttgaaagccttcttcctattttaaaatgaaatttatgttcctgtctgttttacctattgacctaagccctacttgaacatcatgcagaacaactttttccacatgatagacctattcatatctgaaagcaattttatgtcctatctcagtcatctctaaacaaagtcactgcagttctgccaccagaatgtcctgctctctctcaggatctcattttccctttctaaaaaatgtcagtaacaccagttgcctccttctgttggagccatgggcagaagagaaatctggtatctgtgctctgagttcttaggctaggaaggagctttttttttaaatttatttttattttttagttttagtttttttctttttaatctcaagctccaccagaatgaaaggaaggggcttttaaatcccaggtggtattgacagatactgtggtttttctgtgtcctttcagttttaccgatccttgaacatccggattgctctcgtgggcttggaagtgtggacccacgggaacatgtgtgaagtttcagagaatccatattctaccctctggtcctttctcagttggaggcgcaagctgcttgcccagaagtaccatgacaacgcccaattaatcacgtaaatagcctttttccatatgttgtgttgtccttggctgcaaagcctctgcccacccagcacatgctcagagtttgccccatggcgagtgttggttgtacaaggccattctgactccctggtccagagaatcaggcatttcctaaacatgcgctctgtacccagcataccccagaaaatgtttaaaagcctgagtcacattattcctaagaaatgtttacagtctaatgggaaaattagacttacacatattccattgagcatctgaaataattgtgtatgtatttgggaagggactgactgttggtcaggtcttagactttctaagagactcatctcaatcttcctggcgctttgttctaatacatgagctgatctcccaacacaggcacaggagagcgggctccttgtgttgtccttcacttggttcccaaggggcacaaggctgagtgcttgagagagtccaagtgttagacagtgcaggaactgagggtttggttggagggagacattgaggagggattgtgctagattttcatcagcctgggagagacagtgatgggggtcacatgtgacagtgccccagggtgattatttggtatttattagtgttgacttctgaaggtattttgaggcagttacaacaaaaggcatatagataataaaaccatttgtcttcttttcttttttttttttcttttttgagacagtttccgtctgtcacctaggctggagtgcagtagcgtgatctcggctcactgcaacctctgcctcctgggctcaagcaattctagtgcctcagcctcccaagtagcaggcatgcaccaccatgcccggccaatttttgtatttttaatagagacaggattttgccatgttggccaagctggtcttgaactcctggcctcaagtgatccgcccgcctcggcctcccaaaatgctgggattataggcgtgagccacacatgcctggccttcaaaccatttttcttctgttccctaaatatagctgagttaataatcatttaaactttggcttatccttttaaagaaactgggaaaaataactgtccccaaaacctgggctgtaaatagttactacatttgcctaggaagagtctttggctattagaacttttggcctgaactttggaacatgtagaaaataactagtaggacttcatatcaatttgcatagattttgcatatttctttgcagattgtttctctgaagataagtctgcctgtaattcagcaaacatttattgtatacccactatgtgtgagattctgtgctaggttctacgatcccaaaatagttaagatagtcttgctgtcaaagatatcatggtctagatgagaagacaaacgtggagataagtaccacataatgaatttccatataggttctttaaatacattacatgtttgtggcatgcacagaaacactggtagttttttttttcttctcctctaccctggatgtatataactgaaagagggatgtattcaactggggaaaatgaagcttgctgctggcagattaggatcccattgcaaaacaaaggcagaaacagctcattcttgcatccaactgcactttgtgaggctcctgatggggcacagctgtttccttggcccctgagtatgtgggaatgaagcatcatcggccccacagctgctgccccgatgcccccacccctaccctgtgggactcacaccacagagccaggggtaaggtattggatcccggcagctggtggaagtgggcatgattcacttcagcatcagaatctgtgccacccttccatcaacctctccttctgaccttttcctgtgcagcaggaatgcaatgcagctttgcaaaccctgcccatttccttccaaggaatcagctatgggtatattgtgggagataaacgacctttctctctctctttgtgttcctctggagtcatgagggagtaggtgagaggaagtgagaggtgtggtgagctggaagttgtccagttggcctggttacaagggcctctccccttgggaatgacctgagaaagtcagcgggtccagggaacccccgtgatggccacttactcccaggcacattggaacagccctcttagtctcgtccccggtcaccgtctctccttgccttctgcaggggcatgtccttccacggcaccaccatcggcctggcccccctcatggccatgtgctctgtgtaccagtctggaggagtcaacatggtgagtctcagcccgtgtgtgtgcgctgcagaaggcgctgagctgcctttcaagaccagaggtcatcttttgaataataagttgatatttattattgtagcagaaaaagctttgacatcaggaagggcaattgtttaaaatgaagtcattaagttctaagagatggaggtactgaagggtgaattttcatttattatagttcattccgtatcttcaagctcaggaaccctgaagagattacatgcatacatcactagatctcatatgttccaaaccaggggctggaaaatagtaagagagtagaggttaaaagtatttttatttcaggtcgtgtgctgttatatatgtcattaagaaacaagaacctgtctcaaagtcatggttaggaaattactgccttcttttgaaattcactctgacttcatgagactatttgttttgactcttcatttctaacctgtgaagtgcatatcaaggaagacttgtcttcatctatttgtctgtccctctatccattctgtatttatcgacaaagtagcataatggccaaaaccacaggctctagggtctgagcctgttgggttcaaagaacagctgtgtgattttgggtgagttaatgagtgttctcagctgtaaaaaacgcatagttttacagttgataatcataggataggaatgggaattaaatgaaataatgcaggaaacacacttccatgtttagtaaatctctttctgctgcttctttcctgctgggtttttttcctcttgatttctttagcttttgcatcatcagacagtacaccaagtgctgtgcctggagtgtatctgtcttgtgtggttttctcaggaaacactaagccaagtacaccctatgtttgaatcaaggtcgtgttttctatgttgatttccttatgtctggagaaatatatatgttcagaagaagaatggggaaaaatcttcctcttttatttattctgaaagcatttattggtctggaagttcatccataggtcagttgtggtctgcaacctttgagaactcaggaaacatggacttttaaacatttgatttcctcctagtgacagcagattcagccttgctgtcagaggcacatatggagagtctgtatgctcagtgacagtggaattggtggagacctgcaagacttggctaaggataaggcagggatggggggcagaggcagatctgtccccttgaccttgacctcaactctgtcttctgagcaggaccactccgagaatgccattggcgtggctgccaccatggcccacgagatgggccacaactttggcatgacccatgattctgcagattgctgctcggccagtgcggctgatggtgggtgcatcatggcagctgccactgggtgagtcaaacagcaagagggaggatggggaggagggcgggcacacctggacagtgtgacccaggggttcctcccagctggccccactgagactcccttaaacttctgatggggccaaaaaatgtagtttttacaacaaagaaattgagagaagaccaaggcaaatgtgcagcaagaacttaactttccagcaggaggtttggtgctggtgtaaccctagatttatttaatttctgttttaaggtgttgagttataaaattggcttggccatatgtgtcttttttatttcatgaattttttatgaggacacattttgatcatagccacagcccttaattcttctatcccaagagagttggatcagtgctgtttcaattccaggcttcactgaaagctccgatgtaacagaacaagttgaagaagagggccatccacacaccccacagtgacttctcagggagtttgcaggccacattacccatgaggaacagggtgaggcagctgcatctccctgtggtcatgaggaaatttttttttttttttttttttgagacagagtcttgctctgtcgcccaggctggagtgcagtggtgtgatctccgctcactgcaagctctgcctcccaggttcacaccattcttctgccttagcctcccgagtagctgggaatacaggcgcctgccaccatgcccggctaattttttgtatttttagtagagacagggtttcaccatgttagccaggatggtctcgatctcctgacctcgtgatccacccgcctcggcctcccaaagtgctgggattacaggtgtgagccaccgcgctggacatgagggatttttaaaaccagagtctctgaagagaattagggagtttcttcaaaggacttgtcttctagcatctgaactcaggcagcacaaagcattgggttcttccaggctctttggaaggcatcacgttgggaccttgtgttccttcaccccacaccattagggcctgtttatgattcttagagaatggtgtttcaatgtctccaagaaacagtgcagctttcttagagctctggtgtcaattttttaaaattatttctcagctgcttagagcacatcaa

SEQ ID NO: 4 - DNA, 18401 bp, Homo sapien
  misc_feature (1)...(18401): n = A,T,C or G
gctctaagttgtggctgaatgtgaagaccagtgctgccttcttaaccaagactttcttggatggggaaggagttggtagtgtggccggtgcctgcagcaaagttggactgtgtcttctcatccccagggaggctgtccagttgtgacttcatattcttcaatgccccttggtcaaaacttttcctctcttcttgagacctctgttctctgcctccaggggcaggggtgggatgggggaacaggcatgcctagaaagctgttagccatgacagcctccttcaaacactctcctctgagtttggatcctgccacttctgtacccacagctcaagaatgggtctcagtccacgaatttgccatgagctcacgcttcctgctatgaaagcccccttggggtggccccatcaggctgagaagctgaggaatgcaatgacttcatgactgatccttgacttgttctttgtgctctctgcttgtgcattaggcagagatgttgtaagggcctttcagaaagagaggattggaaaagaactccccctctcccagaatcccctccttccagaaggtcttgttgactgaagcacatcctagctgaaccttgggatggacaactcattgtttgcttacatcccctgctactagactcttgcaaagctcccacccaggcccatggggttctcagtcagacttcccatttgggagctgagagctcaatgaaaaatgggaatggaataaactactcagctgcccttgacccgaatgttggagactgcactctactaccaaacttggcctggggtagctggagttctgggaaccttatcaagactcatcagtcaggcctttaggcgacagcctgcatctaggtcaggcggttgggggaatgggtctgtgaatgtgttccaacagaaaggatgacagggtttgcaatctgcagccagggttgttatcttggctttaactagttatatgaccttaaacaacccccttgaccacactagtgttgagttttctcatttgcaaattgcatatgctgatatctgactcgcagggctgtggaagggtaagatgaatcactaatttttatgggaattcataagcaactcttccaaccccacattttacagatgaggaaactgagaggagaaggggaaaagtaacttgcccaagttcagttaaccagtaagtggcaaggcttaggctagaacttgtctcctttgttgctagagaaggtggggataaaagagctctgacaagccaagttcctcctttgctactgctgggagaggcagaggatggagccttggggccaggctgctggggttccagtatccactttgctgtgtcaccttgtgaatgacttaaaacctctctttcaatttccccctttaaaacatggcaataataatatctgcctcataagattgtggtcagaatcacaaggaaaaatctgctaagttgttcagcaagcagtaagagctgggtagatgttagctcttttattttagacatagggcctcgctctgtcccccaggctggagtgcagtgacatgatcatagctcactgcagcctcaaactcctagcttcaagtgatcctcttgccttggcctcccaaagcattggtattataggcatgagccgccatgcctggttagatgttagctcttattgttttgtttgtttgtttgtttgttttgagacacagtctcactctgttgcccacactggagtgcagtagcgtaatcttgactcaatgcaacctctgcctcccggattcaagcagttctcatgcctcagccttccgagtatctgggattacaagtgcccgccatcacgcctggctaatttttgtatttttagtagaaatggagtttcaccatgttggctaaggtggtctcaaactcctggcctcaagtgatttgcctgcctcggcctcccaaagtgctggggttacaggtgtgagccaccccacccgacctcttactgttaataatagtaagttgtaggtgtcatcatcacaagagatagtgtatgtgaaagctctgtaaattataaagcatgctacagaagccaggtgctctattttcgagagaactagggctgtgaacactcttagcatccattcaaagataggaagaggtgcagggattcttcacagccatccctgggtttcagttctttcttttttctttttttggagacagagtctcgctcggtcaccaggctggagtgcagtggtgccatctcggctcactgcaacctccgcctcctgggttcaagcaattctcctccctcagtctccgagtagctgggacgacaggagtgcaccaccatgcccagctaattttttgtatatttagtaaagacagggtttcaccgtgttgttggccaggatggtctagatctcttgacctcatgattcgcccaccttgacctcccaaagtgctgggattacgggcatgagccaccgcgcctggcctcagttctttctgttaaccagcgttttgaaactgtagctgatacacgtttctgaactccttgattctctgtcattccaacttctctgagccccatttactccacacaggcccggcccctcttctccccatgagtaatcctgtgctacggggtttgtggctcccctgttgagttctaaggaccaggttcaggacttgagtgcttcatgaggggcctccaaatcccagatcccacgggtaggttgagaagccacatgacaggctggcatttgaaagcagttggaatcctggccaggaggagggttttgcctgccacgccttctttcataatcacagcacactggctttcctttgtgctcctctcaagggtggcatctgacttgtttaaagtccagaagagtttgatgcaaagacaggggttggctctgtccctcctcctgactatgagcttgaatgggcagaggagccacatcgctggccgatggatcatatgcagatgaaagggcacctgtggtctggagaacgaggccgtgttgagtgtcagcttggcctgtatcctttgatctggctgcatggctggctggatatgctggagcattggcacagctagggctttggattcagcctcttggtgggcttccaggcgccttgaggccatattctttgataaaggagaatttcatgattatttggttgccgatgtttatcgcctgccactctcggccaagtactctactagctcctttatgtacgatattctcaccaccactctggggtacagaggctaaagacactgaaggtcagagagagttgtggaactgcgtatgcttggatttaaatatgcctggctatgccaaaatgtttgaatttaattatttgtctatactcaggattagagctgggagggaggtggagccagagaatacagacacacggggtagctgattattgggtcacatccctgtctggtggggacaaagaagcaactgcaagcagcatggtcctagagatgggggaaaagagaaagcttccatgtctgcaactgtgtggtttgcatccatcccttttgagatctttccagaacttggctctaccctgtgggttttatcttctctctgttctgaccagtgcatctctcttgacttatttgggaggaagcctctaggaatgtgtctcttgttgttacccctgattcgttggacaccgtcctgatttcacccccttctgtctggtttagcactttagcatgcccaacagtgcgtatttgcttcctaaattctatggttacctgacttataaaatgctcggccagcacttgaaatggttatttcaagccccttcttttggtttgtaattatatctgtttggatttctcattaatgactgcctctcacaagaccataagccccacgaaggctgaagctgtgactccgtttgctggctatggtgtctccaggggctggcccctggcctggcacagagcggtggtcacagctgtttgtagtgatggagaaattctgacagccatgagacacagtggctggagagcagcagcagacctcacgggcacaggtaccaaatcaagtacaatccagatgtggagggatttgtgtgaaagagcatcttgagctgtggaagagtagggagtgtttgtttcctagggctactgtaacaaagcaccataaacttaaaggtttaaaacagtagaattttactttctcacagtcctggagtctagaagtccaaactcaagatgttgtcggggccatactccctccaagcctctggagagaatccttccaggctcttctagcttctggtggcttctggccatccttggtgttccttggcttgcaacttcatcactccagtctctgcccccatcttcaaatggccttcttctctttctgtgtgtgtgtctgtgtgtccttccctcttgttagaaggacacaaatcattggatttaggaccttctctaattcagcatgacaccatcttttttttttttttccttttccttgagacagaatctcactctgtcgcccaggctggagtgcaatggtgcgatcttggctcaccgcagcctccatctcctggactcaagcaattctcctgcctcggcctcccgagtagctgggattataggtgtgcaccaccacatccggctgatttttgtatttttagtagagacagggtttcaccatgttggccagggcggtctggaactcctgacctcaagtgatccatctgcctcagcctcccaaagtgctgggattacaggtgtgagccaccacgcctggcccagcatgacatcaccttaatttaactacatctgcaagaccctatttccaaataaatcacattctgaggtggacatgaattttagggggattctattcaactcattgcagggggttgcaaagataacattggtggggaggcaagttctttccatggcatgcttttggccacagaaaacactgattcctgaaagagccctgaactaggaaaattctggattttccaatcagcagggagaccttgggcaaatctctttgctcctttgagcctcagcttttcatctgcttcatggagataatgacatcttccctgccccgtctcctaggattattatgggaatcagatgaaatggtggcttggaaagctctttgcaggttgtaaggtgctataaggttgggtaggtatataataagccatgagtcatccatgaccatcctgagatattaacattgccatgcttatcagtgttctttagcctgaccacctcctttctccttgctaggatcactgcttttaccacggcacggtgagggagacagaactgtccagcgtcacgctcagcacttgccgaggaattaggtaagagaccctgaggctgcaggtggcaccgggcactctccccaggaatggaagtttcaagatagacaaggctgaggcaaggaccttgggaaggagtccattgagaatgtgtgcaagccagcccagagaggggctgagcctgggaggatgggcaagggaaagcctaggtaatccagaaatccattgggatttaactttcctgatgaacttgatgttttaaaatataggttttgttattatttaggtatggtaaggccaaaaaatcaggagatgactgccattgaaaagatggtcatactcacagaaaagggaggggcccggctgtgccatggggggcggcacggggaggcactggggttggtcagcgggcagagggagtctggagaaatgtcagcagacgcccttcttgtggtttctgcgggaaggaatgggcgaggcagagaaagcaggtttaggattggctagtttgcatcatttcagcaggctctggggtttatgggctctctgtccttagttgtcctatacctggttctggggtgattagggaagggggatagtggcccagagggtgagagtgcccataaaataaatggctagggtatggactctggattggttggcttgcatttgaaaggcaaggtagctgggaaattgttgaccatctctaggaattggctaatcctggaaggggcagtccctctatggtcagtaagacccagatgtcaaagaaacagaagataaaaaagaagacacatggttaatatgctcgggatggatgagtttgggcatttggttccacacctcctcagttcttctctgggagatgtacttggaggtggtgaaataggaaatggacggttaatgaacagagagtaggaagtgaaaggaaaggcaaggataattttcaagacagaaaatcaactgaaaagttctgaccagaatgtgcttttgagagtgacccttccttctctgagtgagactacctggctttgagctggtagcagtttaccagctgggtgaccttgggtcccagtggtctcatttgtaaaatgtggataaaaagaatatatgcctgcagttgtgaggattcagcttgtgaatagctatcttacctaggaacttgcagtggcacactgtcagcatgcagtgaactcctaggactttgcttctctaggtgtgttccatggatgggcagcatcaactttacctgggagcttgttcgaaatgcagcatctcaggttccacgcagacctactggattttaatctgcattttaccaagactcccaagtgatttgtgtgcccattacagtctgtacctgagaatgtgtgttccttgagaatatgaagtatatctcaaatatctatttctctccaccagcctgccttaatgccttgcttgcagtaggatctacacatgtatgttgacataataagtcttatttatgtagaccactttcaatctccctcctctttttttttttttgaagaaggatgatgatctaaaaaacctggtatctcattgcatatactaattgcctgggttttgattgtctgtactatgtggtgcctctgtgcagtgatagacagtgagctacagtttcccagaatacacaggctcagtgtgagacacttcagcccagtgtaaactggctctatgacaaaaaggaaaaagccctgatttgtagcatctgccaatatgctgacaaagataatcccaccatgatcaatttcaggctaccgatgtgatgttattgaaggcagaattgggaagatatgcctttgattggctctggtgagctgataggaggtggctccattgtgtgttcttcctctcttgactgattgcttcattcattcaatgattgcatttttcattcacaaatagaaattgggtgtcttcctaatgcccataccctacacaggtggagggaaaaccagcactgtaattttggagccctcagtttccttgtcaataaagtgaacatcagtattaagcatggtagagattattgctgtaattatagtacttttaaacataagggtttttcctcctcttacgtcggtgaaaccatgctaagacttatgcaggctcctatacaaatggaaggtttctcacactgcaggtcccaagtgtctgtttataaattgggccatgactttgtttgaatgctgcatggtgagttggctggaggaaatcaggcaggaaatgggctttggatgggaagcaataacagagtggccccaaatcccctctgcttaagtgacctgattgagccaagctaactggcctcgcagtggtatttacaagcccagccaccgccacctgcagtctgcaagtaaacaaagtttgtcccaagaaggaggaaaaagaacatgcaggtgtgacctgcttctgtctgcctcttcctccatcccctcagtctggagcagtgggaacttggcttggcgtcttgtaaatcattccagcagcagtgctgaaagggagggggataccgggtgagctgtccgtgtgtttctgttttgcatgcttccgtctggtgaggtccacctgccttactttcccagccttctcactacacacgccttaagaaaccaaggctgtgggtggactgatttaagagctggagactcatgccagatggttccatttgaaccctggagaaggagcagctgcaacagcagcaacattcaaacccatgtcgtcaaaacactaggcgcctcccaaagctcataaagcactgctgcagtgaaaaatctccatagtgattgttcttctttcctggaaacatgctcccatgattggagaaataggtaggatttctatcaagtgagatcttcaagctgatgataccaagaggaattcagctgagcttctaggtggttgctaggccccctcttctcttcaaagcagttctttaggttactttaattgaagaagtcatgtattatcttagtaaaaataaattcaaaaagtacaaaagagtgtacaatgaaagataacatctctttctcaccccagatttccagattttcccccttcctagagacagccgttgttactagtttcttgtatatccttttaggaatattccttgtgaaaaaagaacgtagatatgtaattgatatggtttggctctgtgtccccacccaaatctgatctcgaattgcaatccccatgttttgagggagggtcctggtgggaggtgattgaatcatgggagcagtctccccatgctgttctggtgatagtgagggagttcttacaagatctgatggtttaaaagtgtcagtttctggccgggtgcggtggcttacgcctgtaatcccagcactttgggaggccgaggcaggcagatcacaagatcaggagatcgagaccatcctggctaacacggtgaaaccccatctctactagaaatacaaaaaattagtcaggcgtggtggtgggcacctgtagtcccagctattcgggaggctgaggcaggagaatggcgtgaacccgggaggcggagcttgcagtgagctgaaatcgcatcactgcactccagcctgggtgacagagtgagagtctgtctcaaaaaacaaacaaacaaaaaaaagtgtcagtttcccttgtgctccctctctcctgccatcttgtgaagaaggtgcttgctttccctttgccatccaccatgactgtaagtttcctgaggcctcccagccatgcagaactgtgagtcaattaaacctctttcctttataaattacccagtctcaagtagttctttatagcagtgtgaaaacggactaatataggaatataatgtctgtaatcttatttgggcccctggaccctttgagaattgattggaagctatgggtacttataaatgacaccaataggccaggcgcggtggctcacgcctgtaattccagcactttgggaggccgaggcaggcagatcacttgaggtcaggagttcgagaccaacctggccgacatggcaaaactccatttccactaaaaatttaaaaattagccatgtgtggtgttgcatgcctgtagtcccagctatttgggaggctgaggcaggagaaccgtttgaacccgggaggcagaggttgcagtgagctgagatcccaccactgcactccagcttgggcgacaaagcaagaccccatctcaaaaaaaaaaaaaatgacaccaataaaaagatgtggcatcccatctcactggggatgtcaagtttcattctcccaagcctgtctcagattaagacattctctaaatatctatactgggttaaggtgtctctgactgagcctgtgtgttctgggaaactctgtgtgtgagtctgtagctcactgtctatcagcaggaagtgtatctggttggtaagttgtttacttttttaaaaatttttttttgttaaaaattatcattatataactatacaggtttagtgttaaatgttcaaatcatgcaggaatgtgtaagctttaaaaagtgaaagttgtttatcttgtcctacccttccaaccaatcccattctccatctgttattactgttggaggtatccttaattactgttggaggtatcctttattgaaatacataattgtgtgtgtgtgtgtgtgtgtgtgtgtgtatatatatatatatgtatatatgaacatatttaatccaaatgagatcaccctatgcatacagttttgtattttttttccaacttaagcattatgttttaggtatacatagatctatctcattcttttaatggttgcataatatcgtttgtactaatgtctggcacgtttcattatatagaaagtctttcagaggtatgcaataaatcatccatagtggtctatttgatggatcacccttatattacagcagccctgccttcgaaaacatagggctcactctcactgtaattacaccttaaccgtggtccctggactcagattctgtgagagagggagagagggagaacatgagattgaaaatgaatgcaggagaatgtgtaggaaagtgtgcatgatggcctggaataagctcaaaatgtaaagtcaagggatccacgtttaagatctagctacatacttcctggctgtgtggatctctgtgttttcctctccccattaaattttttccttgtctttgctgtggccaggctggtccctccacaggcccctactctatccaaaaggtggctaagtcctgggagtggggtgggtggtcagtgggggtgaggtcaggggcataccccagagtcatgaacctgaacattaggagagctgggattagccccggctctcacattaactggctaggtgagcttgggcaagttcttttttgggtgggctttcctcttttctgtaaaacaagagtagaccagaccattaaaagcttccttctgtgttggaagtcctgggatgcagagaggttgggcagagtctcagggaggtgggagcctggggcagaaggaggtggctcatatacacacagccagccctggagaagaagtggcaagtcctttccacctttgaattccttgccttccttctgcagaatggatcataaatgctacctccgtgtcaggcattgcacagattaagccctcagaggacagtgttattaagttgtgatgaatttagattctggagccagacacttcctggtttaaaccctgccaagctacttaagttctcaagtctcagttgtctcatccataaaatgggaataacaatattgacatcactggtggatttacaataggtgaggagtgcaaactccttgacagcagggactttgctttgatcatgctatttcccgagctgagaacagttcctgtcacacactgggttctcagtacagatgtgtagaatggctatcgaataaaacactttgcgctttgcttgatgtataatacacaatcaatgaccgttagctgttcttttaaaatgctgctttggttattagtaaatattgcctattcagtccattatcacagcaactctgtgagatgggcagtgttattacatcacttaccacacagctaggagacagcacagccagagtttgaatccaggtgctatatgggggcaccctgtccttgagaaagtacatgacctacaagccttctcttctcttttttgcaggctttggagttccctgtaactccttttggatggatataatttgcagagaaggggagaggaaagaagggtagcagggtagttactttttagggcacctctgggtatagggatgtagaatgtgtcccctttggtttagctctgaatggacaagtccccaggaagcagttgttggcctagttccttgaagaatgcatttggtgaatccttcagttatgcaggggttaggcatgaattgcttggtgcctgcctggcctggcctgcccgggttttcctatacaatttcatttgtatccatctcttaacgatgagcaataggatggagaacagaatggagaatggcatgtgaggctggccacccagcctcctgggccccagctcatgccttctggctgagttctgcctttgccagggctaacattcagcaaattagatcaaccaaggctcctagaaggataaacaactggtggtgcttggaagagggcagctaaaggaattagggttgagggcggggacagcccctggaaccacattctcagacattcccccagcaacaaagctgcagtccactgacagtgctggggcttgtgccagcctctcctccatccccaggccgtctgagaggattgcagtcgtgacatgggcaaataaccaggaacagcagttggaggaagggagggaagtggccacagaatcctattgctggaacgaccttcagggtccttctgagcctctgtttctctcaaattgtaatctgcccactccctgaatcagaattactatgggcctggtgaaaagcaggtgcctgctacagagggtggtctgtaggccaaagttcctgagtgtggctaggcagggaattactcaggcctgcagctctgcgttttttaggttgggccctgtattagtccatttgtgttgctataaaggaatacgtaaggctgggtaatttataaagaaaagaggtttattttggcttacagttctgcgagccatacaagaagcatgacaccagcatctgcttctggtgagggcctcaggctgcttccactcatggcagaaggtgaaggggagcctgtgtgtgcagagatcaagtggtgagagagaaagtgagagagaaagggaggaggtgccaggctctttttaataaccagctcttgaggaaactctcatgggaatttgctgagtaaaaactctctcattaccaccaggatgcaccaagccattcatgagggatccaccccatgaccctaacacctcctaccaggcccacctccaacaatgggaccacattctaccgtgagacttggtggggacaaataaaccatatccacagcagacctggatacctatgttttcaatacactgtagaatattctaatagatatccctgagacctctgctcctagagatctctgacacttaggcttggaactcactgatggaggcagaaagcacagaggctaaggggatggggtccagagtctgtggaccttaaatctttgacttcagattacctagtccccatgcctggagcccacactgcccttaaccatgagagcttgttatttaatgtctctgagccacagtttcttcatctataaagtgggactcatgagggtgcctccttataatgatgatgtgggaatgaaataagaataacatttgtaaacacagtgcctggcatccagttagctcaatcaatggcatctgaaggtgaaaagtaggctgcatacctccttcatcttttctcttaggaaactgaggtgaggccaatcacccctaagaagagagctgctggcaccatcactggagccatctgtagactggtggtatctttctaattcactctacagggtatttttttttcttttggagatggagtcttgctctgtcgcccaggctggagtgcagtggtgcgatctcagctcactgcaacctccgcctcccaggttcaagcaattctcctgcctcagcctcctgagtagctgggattacaggcacccgccagtacgcctggctaatttttgtatttttagtagagacaggattttaccatattgcccaggctggtctccaactcctaagctcaggaaatccacccgccttggcctcccaaagtgctgggattacaggtgtgagccacagcgcccagcctctacaggactatcatgattgaggcagtggaaggtcagggtaaggttgtgggacttggaactagaatgcttccattcaaatcccgactcctttaatacctaggtgataggctgatctgtgcagcaaatcaccatggcacatgtttacctgtgtaacaaacctgcccatcctgcacatgtaccctggaacttaaaagttgatgaaacaaaaacaaaaaacaaatccctactcttactcttactgtttgtgtgactttgggttaattaaccttgctgagcctttgttttcccatttgtacgttggggacaatatttgtaaggatcctaggaaggtggtgggaagaataaaatgctcacttagcacagtgccaagtccatagcaaaggctctataatctgcagccactatgaggattcttatttattgtgcaccacactatggcttggtctctgtcctgtttagctcacaggcttgttcaagtgatgccagatcagttgcgccttgtgaacctccattggaactttccctgattcctctatggaactttccactcactgggtgtaatcttggcaaccacaacctggtgcacacagaaccatcagctggttggtggtcaagccctctgtgttcccaaagtgtgtagccgttaggggaaactgaggtgatgggagaggccttggttggctgagatgaaaagataacttgggaacaggatgcgtgcagcagctctctcctctgccctttcctggctggattagggagtggatgcgacccttgctccttgccacgctcccacccccagatgttcagggagtaccttagatgtccgtcagagggggtgattgggtactgctgcgtcagactgggtgaggcaaccaggaagtcatcaggcttcctggatctggaatgaggtcagccagggatgggatccgggaaaggctgctgcccatcagagcctggcgctgattttccagagagcatcacaggctcttcccaaagggcaaaatctgggcaggaatcccaagtggcggttgtggtggaggtggaagctgagataagctaagagagaggtcctgccaatttacagtggcaaagactgggttggagatgctgtaggttctgagctctctgcatggatgagagcctgcctgaggttttagagcatacaaaatgctgctagagtccatggggcttactcctgggcttcctcctcccactaagccttgattacatacctttacaatcatgtttatctcattgtatcaaggttggcagatatctgctgcctgggccttcactgatcattagcaatagcaattgataataagtcatggtcctctttcttgctgaggctagaaaagccctcagaagccttggtgatgtaacagttgaagcagctgcctccagtccaaggggtgatgaaactttttgctctctctgttatacattagagtgacttattccaatgtttacactcaacgcttcacaagggtaggcacttggtgtgtcttgttcgctattccgtcctcagcaactggcatgatacctggcccgtagcaggagcccagtaaatgtttgtgactgtcttccagaggactgtgagtttctcaaggacaaggattatgtctagattatgtctaggacacatgagtttattctgagttcagtgctagtatctataatcaagggaggaaaaaaagtagtccctcatgcttggtggtggatgtcacttcaccaaataactaccgtgctgacgtggggcaggtgggacaagtaggcgtgtcatcactgatgcatctagctctggtttccaagcacaaagacccttgtctttccacttaatcatccagtagtcttgataagttatcattgccgtgttagggatgaggaaactgacgcttggagagatttaagatgcttgttgaagagcatgtgacaattgaatgttggagctaaatccagaacctcggtcacctcacttgcaggccactgttctttctctggccactgtactgcttttcctgagtctctaaagttttgacccatgatttgtcatatgccatgttttggtttgggaggctttttggaatcctggacctaccatccttcataagttttaagtgtcacaggtacagccttcttagaactttttgagatttcccagtccagagacttttaacctggagtctcacgatgagcttggtggtggtggttgggtggggtgggggttggggtggaggtccaagtgccctgagctcatgcaccactttttatgtataagtgcattcctctagagaggaagtgtgagcttgcatcagagtctcacgaaggggtacatggccccataattaggttaagaaccaatgatcaaaacccactatgtcattttgcatatggagaaactaagacctacacaagggactttttcagaaccataatctttgaccagagattctatttctcctctcaacagaggactgattacggtgagcagcaacctcagctacgtcatcgagcccctccctgacagcaagggccaacaccttatttacagatctgaacatctcaagccgcccccgggaaactgtgggttcgagcactccaagcccaccaccagggactgggctcttcagtttacacaacagaccaagaagcgacctcgcagggtgagttttgaggctctcagtgcagaaatcaacctggggacaggcttgtcccctctgaggttgcttactttgaatccaggagtatttctaaattgaaggtgatgcctaagaaaaaggaaatagtgtttttcttttattctgtcattgttgagtgtgaaataccctcatcatagaataactgcttttgggggaaaacactactacctttaaaacactcagatgctgacttcagaaagcttaaaaagtgaaaagaaggctgggcgccatggctcatgcctataatcccagcactttgggaggctaaagcaggcagattgcttgaggccaggagtttgagtccagcctgggcaacatggcgaaaccccatctctactaaaagtacaaaaattagctgggcatgatggctgggtgcctgtagtcccaactactttgggaggctggggcacgggaatcacttgaacccggaagcctgggtgacagagcgagaccctgcctcagaaaaataaataaaaattaaaaagtggggaaaaaaagtatgctttccctattggagtagacactacaccatatgcacacagtcctcatattgattcatactgaaaatggcatggtgtttcgaggtttcgaggttctgtgggaacgtggtggttagcacactccctctcatatgctggcctctgtcctgcctgtgctcatcagctcatctcagtattttctgagaataaaggactgaatccagggtcccagagcagcctccagcaataaccaaatggcagtggaaggtgttatatgagtgatggccaccacagccaagaacatctctagtgccgaatgacaaaatcattacggaggtagctgctgcttatccagcagctctgtttcttagcagttttttaaaaatgaggccaagtccactatttctacagcgctgatctgtttctctttcttagatgaaaagggaagatttaaactccatgaagtatgtggagctttacctcgtggctgattatttagaggtaagggggaggcaatgggtcttgcagaaaaactgctctcttgatagcttccattccaggctccagactgctttggggaaatgttgcccattcatctttctccagttcatctatgattttgaccttaaatctcaccaaaggctgggcgcggcggctcacgcctgtaatcccagcactttgggtgggcaaggcgggtggatcacctgaggtcaggagtttgagaccagcctggccaacatggtgaaaccccatctctactaaaaatacaaaattagctgggcatggtggcacatgcctgtaatcccagctacttgggaggctgtggcagtagcatttcctgaacctgggaggcggaggttgcagtgagctgagatcatgccactgcactccagcctgagcaacaagagcgaaactccgtctcaaagaaaaaaaatctgaccaaaggctcattttgccattttaaacatagttggggggaacttctccaactacagtattgctttacttcactagtaaagacacagtgaaatctccactggatcgggacatataccacgctatacattaagacagctgtacgattaacatttattgtgctgtgactgtataccattagatactggtgcttagactgaggaacccgtgatagtctatagaaaatgtcaaactttctatggggaaaagatgaaaaatatatttgcgagggctccacacgaatactgaattcttgccgatgtgtcggacctattatataatctttgtgcagacacacaactaccctaatggctggggcccaaaacggggtttctggatcaccataatcctaaaatccctagtgttaaaacaaatactcagaccgtgcaccgatctccttaaactagaatgtacggtggggtcaaaaatgcttgcttaacataaacatggaaaactggttcgacaagtatgttattacccccgacggagggcctaggcttagcgttaactcttctcctaagtcaaaccgttataaaattggtgaaccctcccagataatgtggctctggttataaaagaatnnnn

SEQ ID NO: 5 - DNA, 35192 bp, Homo sapien
ttgcagtgagccaagattgtgccactgcactccagccttcagcctgggcaacggagcaagactccgtctcaaaaccacaacaacaaaaaaagaatgaggcaggatacagcttcacagtcatgcctggatccctataagctcatggttaagctcacccctttctctctcaatctaaaaagcgtatctgaagacaaatgattgagagttatattgattactactctctttcatttttaaattattcacaaatatggatagtttaacaattattagtaacaaattccttggagcataccttcccactgaaggaaaagctccagtttcttggagggtttaacctttaattggtttagagaattgggagcaggataactctccttttgtagacccagatggctgtactatttgtccttttcaccaatggtgggacccaggaccttccatactcctgtgataaagagcatgcgtttatgagttggctggttgagtttggaatgccctctgcatccttagaacagcaatgagatcactggcccaaaatgaaataaaacttatgatcttggcctttttttggcctggtcctctgtcacaagagaatattcacctgatatcagcttcaggaaaagtttaggttggctggtgttttcttcagtgctaagtctcaggagacctcttgtaacacactcacaaccctttacttatcgcagccccctcatgcaatgggcagaaattgctactcctgattctcaaatgctttctgcatgccgactaagaaaaatagaatgttatggggtggttaatatctcatcactaaggatgaaagaattcttttttttttttttatactttaagttctaggatacatgtgcacaacgtgcaggtttgttacatatgtatacatgtgccatgttggtgtgctgcacccattaactcgtcatttacattaggtatatctcctaatgctatccctccccgcctcttgctaccctacaacaggccccggtgtgttatgttccccttcctgtgtccaagtgttctcattgttcagttcccacctatgagtgagaacatccggtgtttggttttctgtccttgcaatagtttgctgagaatgatggtttccagcttcatccatgtccctactaaggacacgaactcaagggatgaaaaaattctaaattaatgtattggtaaatgttctaaggggccagaatgtatgtgtgtgagacaatgggggtctgaacccaggtggagtcagccccacgggtagcaggagtgacagcacgagtgacacctgcctgactgctagatgctcaaactccccactaattccagccttgtcctctgccaggcacccctttcccaaagtgttcaatggatgcaacaggagggagctggacaggtatctgcagtcaggtggtggaatgtgtctctccaacatgccagacaccaggatgttgtatggaggccggaggtgtgggaacgggtatctggaagatggggaagagtgtgactgtggagaagaagaggtgaggggtcacaatggtgctagtgggaggggaagaatttgcattggtttcaaaactcaaggtcaaagagaacacaattgaaaatttcttagtcacaggtgtttcctacatataactgtccaataccccatgaaaaatcagatatgaagaagccttccagttggagtgtttgtgccgcctctgctagtttgtggccagcatcgctagtgtccaggatcagttcttcttatgagtgtctggtctaaccagaaaccacgatcacgtggcatgttgactctgtcttcctcagtggagctgcacatgcctgcttgccctccagctgcacggaatttattctggaggccacacagccagatatatgggcttgaacaggggccttatgaggatgcttaaaataacaagctcatgctgtttaggctggaggagagatgatggaaaggggatgtaggaagtgctgtcaagtcccaaaagggctgctaggaggaactgtttatgtgtaaactctctccttccttctgatcttcacagtgagtgtggagggtacacggcagagcccggtcatttttaacaaatgcatgtggtttctgcagaaagcagaactggattgtttcgtctctattttttgaaggctgaaaatatgtatgtttatacatgcataacaatttggggtagataacaagtaacagtaaattatgggggtgagactgaggttctgtataaatggaaaaaaaaatctgattttatggccttctctctctcactctgttgcccaggctggagtgcagtgacaagatctccactcactgcaacctccacctccagggttcaagcgattctcctgcctcagcctcctgagtagctgggaatacaggtgtgtgccaccacacctggttaatttttttttttttgtacttttagcagagacagagttttgctacattgaccaggctgttctcaaactcctgacctcagatgatccacccacctcggcctcccaaagcactaggattgcaggcgtgagccaccgcaccctgcctgtgacctctgtgatgtgatttttctttttttaatgccagtatgtcactttcagaataaaacaagaactagtcaaggatgccacccccaccaccatgagcccagagagatcaacacagacccatcagaaaggagggagtggtatgaacatggagggccactggggttgaggaatggcctgagagtgggcatggccagttggcttaggttctgagcagttgctcattcaacaggcacactgagtgtgggctactgtgtctggtcctagggttaggatgagtggcaaaaatgacatagttcctgtccttggggagctgatagtctagtgggagaaacacatattgaaataattgcaaaagaatatatgtacagtccatggcaagtgctaggaagacaaatgacacagtgctctgaacatatataatgtgagggggaacctccttgcttgtgtgggaggtgacctggagcccatatctgaaggctgcattaggagttagtgaggcacgcaggagggaaggcacatttcaggtggaaggggagcctgtgccttcgtgggaagaaatatggtacattaggaaggcaggaatacaggtcttcctggagcccaacatggtgggagaataatgggaggaaagtgttctattccttctcttaggggagacaggtggacaggtgtctgtggtcaggggatgggatgtggctctccaatatgctagagccctggacagttaggggtataaggttgataaacatgaggtaggcctcaggcagacctgacttgaattcagcaggtgtgtccctcggccagctactggacttgcctgagccacagcatccctgtctgtggaatggggtcaaggctgcctcataaggctgtggtggagagatctgtggagccccgtacacttttcatcaatggctgatggattggcctgttaatactgtaagagtgtgatgaggacgctcagggtcactggaacgcctcataatcttttaaaaatctcaggctgggggagagcaaggaacccatggagatcttctgttccagaaaggtccaggccaggaagggcttaggaagagaagcagatggagaaaaaaatctaaggaaacagacccaggagttgacataaactgtttggagaggttgttccagcagactcttgcaccggcagccccttttcatgagataagaaagcctaggagggttgggggcaggagggcacccatgaaagacagggtgtctggatgttctactggggattagaaaaacaaaacataaaatttccatatactctgctaaaaagtccattttagaagactacatggttacagggagaaatacgcatgttatattaagtaaaaaaacactgtggatactatgattttgtaaagtaagtataaatatatatgtatgtgtgtagaaaatgccttgaaaaatattcatactcaaaatgtagctgtgtcctagcggggcatggtggtgtgtgcctgtggtcccagctacttgggaggctgtggcatgagaattgcttgaacctaggaggagaaggttgcagactgtctcaaaaaaagatgtagctgtgtccaagtcatgttactaatgattgtgcatatatatggttcttgtgacaagtacacattagcttagtgacgaagctgtcacatgatttttgaggtcaaaagtttccaggccaggtgcggtggttcatgcctataatcccagcactttgggaggccgaggcaggtggatcacttgaggtcagaagtttgaaaccagcctggccaacatgacgaaacccaatcgctattaaaaatacaaaaattagccaggtgtggtggggtgtgcctgtggtctgagttacttcggaggctgaggcgggagaatcgcttgaaaccaggaagcagaggttgcagtgacccgagatattgcatcactgcactccagcctgggtgacagatcgagactccctctcaaaaaaaaaaaaaaaaaaaaagagatagttgctagagagctggggttccaggggtgtgtgggcaagggtggggaaaatgttgggggtggtgaaggccctcccccactcacacccaccccactgcctccccaggaatgtaacaacccctgctgcaatgcctctaattgtaccctgaggccgggggcggagtgtgctcacggctcctgctgccaccagtgtaaggtaagtggcccttttctccacgccttgggccctggcctgacagtgggaccacaggactgctctgctggggtggatggctggggatttgcctccatcctgggctgtgatggcaacagagtttcagaaacacagagcggaaaaggtgccttgaataaaatttactattcctatactgggcctcactgaattcagatcatcccagaggagggtggcgcttctttggaaatggtacttttttttttcttttttaaagaagtatccagagagagtgggcttgattttattgagctcataaacaataataattatcatcatttgtattgacattaatggacctcttagtagatgccaggcactgtgctgggaattttatgtacgttatctcattctctcctcacaaaaaccccataaaatatatgtgactatccttattttaagatgtggaaactagagcttataggggataagaggtttatctggaatcaggcagtcaggaagggactgaatccagctttccctgactctggtgcccacattcctaatattgatgtgagagataaattgtctgttgctgctagtgttaccgtagaaccacaatctctcttccacaattctgaaattaagggagttctaaaagctgaaaaaaaatgtaaacacatttggtggcaaaacttgacctgaattgacatgagatgaattatagtctttttaaaaaaaaatcactcctaaagtgaatatttatattgcattacagaaatattaatatgtttgatcagaaggtgttatccccagccttgctggggggttatgtaatatacatatgtagttatatatgcggacatatgtaattatccatatccatatatatatatatatatatatacatacacacatgtgtaattatatatgtacacacatgtacatatggacctatgtattacaatatctgctttctaaatctgaaaagcctgaaccccatctggccccatcattttaggcaggaactgtgggcctgggcttctgcctagcacttgctgagtgctcgttaggggccagataccattcacatacttagttctaactcacgtttaatcacccattagtgggttattatcctgagttgtgggtgagtgagcacacacaggttacacagcaggtgcccaaggccccgctgccggttaaggagctgggatgtgtgcccaggcaggctggctgtggggcaggtcctctttgcctccacctgcctctggatggcagaggtgtgtcctgcagcctcctcctgcatacaccacccatgcccacacttgcgactgggcatccactctcagcaagctgctcagctggcccagtcttggcctgagagtggccggtggagaagcctgtctgccttctcctggaaggaccctgtgggtgggaggagtggcccaggagcaggggagggggtctgttctcagtcactggtttccttgcctggctctcggaatgtgcacggcatctggtttggctgtgcgtccccctgggaggctgtgctgggtcaagttcttccagtcttggcccaaggcctaagcataagcatggagtggaccccttcactccacacaagaatttccgtttgagcctcagaaaggattccctggtgtccaagactgacttcaaaccctggttgtgtgatttggggcaacctattaactctctgagcctaggttctttatctgtaaaatggaaagagtattagtaacaccgactacccagggaggctgtaagactcttcgccctttgccccaggtgtgctgttgatcaacttattgatctgcaaagtgggacaaatagcagtatctatcccatggaagctgtgaggatcccacgagatacgtgtatgtcacacactcagcccagtgcctggccccatagtggggatatattattgctgaggtgctttgtaaactcacagatgttatgtgaatgctagttttgtgtgtgtgtgtgtgtgtgtgtgtgtgtattagtgggcctggctcctctgccacttactatgagtctttggatgcatcgtctaacctctttaagcctacagattttatcatctgcagaagggataattatatcacacaggactgtcatgaaaactaagtgaagtcatatttgtactggacacttaagtgggagctgcataaaagtagctgctattactaaagcatgtaggaaactgtaaattgttgtataggtattatttcttgcctctttcttaagacttctatgaagagaaagtgagttagcatttgtgaaaacagcttgaaattctgtcagtattcacatgagaaggctgaaggtggtttgggctaatgaggtcatgtaaaaagtgctgtgaaatcatggtaatggaaaattctgttctatgagagtgatccttatgagcccttgggcaacagggttgagggtggggaggagattgactgtgttttcctctcattccttggctcagctgttggctcctgggaccctgtgccgcgagcaggccaggcagtgtgacctcccggagttctgtacgggcaagtctccccactgccctaccaacttctaccagatggatggtaccccctgtgagggcggccaggcctactgctacaacggcatgtgcctcacctaccaggagcagtgccagcagctgtggggacccggtaaggctctcctggggagcacggctctccccagcccaccacttcccagccagcctcccctggccctcagggtagtttggaatcttggcttcaaatggcacctctagatactacctctttcatccccttgactcagggtagatgttcagggagaaccagaggacagtgttccttcccagtcccttgatgcttttatttctcagagtggacaattgaataagagtaatccaaaagaaaaatgagcagaggatggagacagagaagcaaatgcaaatggcccttaagctatgaaaagacgtttaatctcagtcatattaagggaaagcaaagtataattatgatgaggtgagatttttcatatatcagattgcaaagactgaaagttaagataataataatataacaacaataataatgatatagtgttgtggagggtgtgaagaaacaggtagatataaccactatggaaagcaatttggagatatacttagaaatgcagctaacacttgcacatgtatgtgaggatatatttactatgatgtttactgcaccattgttagccatagcaacaacaacctatgtgtccttcagtagggaccaattaaattaattctggtacattcatataatgcaatgctttatggctaaataaggaggcagccctatatttactgaataaaatcatcttccacaaaaaattaagtgaaaaatgcaaggtgtagaacagcaaataaaatatgctttcaagccagatttggtggcttgcacctgtaatcctagctactcaggtggctgatatggtggcttgcacctgtaatcctagctactcaggaggctgaggtggggggatggcttgagcccaggagtttgaggctgcagtgagccactccactctaggactccagcccaagcgacagagggatgtaccatctcaaaaaaaaaaaaaaaaaaaaaaaaaaagactgggcacagtggctcacgcctgtaatcccagtactttgggaggccaaggcaggtggatcacctgaggtcaggagttcaagaccagcctggccaacatggtgaaaccctgtaactgctaaaaatacaaaaattagccaggcgtggtggtggacgcctgtaattccagctactcgagaggctaagacaggagaatctcttgaaactgggaggcagaggttgcagtgagctgagattgtgccactgcattccagcctgggtgacagagcaagactctgtctcaaaaaaaataaaaaaagaatatgcttccattctttattagatagattatctctagaagatacacacagaattatacctaggagatacagaaattagagatttaagtatctttagaaaatatactgttaataagtgctattcctccaggatgtagagaagtaggaactggatgactacaagaaaaattttccaagacatacttatatctttaaaatattatgcatgtatgacctattttttaaaatcttgaatcggaacatggcttcttcattagagagcaggcttagcatgcaaccctccccacacacaaatataaatcctcaataaggtaggaagaatttacataaaacaggccaggtgtggtggctcacgcctgtaatcccagcactttgggaggccgaggcggggggatcatgaggtcaggacttcaagaccagcctggccaagatggtgaaaccccatttctacaaaaaaaataaataaataaatacaaaaattagccagtcatggtggtgggtgcttgtcatcccagctactcgggaggctgaggtagagaattgcttgaacccaagaggcggaggatgcaatgagccgtgattgtgccactgtattacagcttgggtgacagagcgagaatccatctgaaagaaaaaaaaaaggatttatataaaacattattctctgagtagatcttgttgagaatatggggatggagtaacctggagggaacaggaagaagaggctgagtattccctcccagaaaatattcttaccttcatgactttaccaaagatacctttgcccttgggggcttctgacagatgagtatactgatagatgttgcttgcccacccaggagcccgacctgcccctgacctctgcttcgagaaggtgaatgtggcaggagacacctttggaaactgtggaaaggacatgaatggtgaacacaggaagtgcaacatgaggtgatgaccaaagggcaggcctcatgaaatgaggatgaacaagcagtttctgctctgtcctcactgttgcccaactcagcagtgtgactggccccagagctgcacctttacgtcaatcagttgaagtcagtcatctattctcggccccctgtttgacaatgcacttttcagctctgaggaagtcagaggagggtgtgggtggcagtgcttcctagaaagctgatcgggcttcctttggggaccatcttacagtagggcagggaatcagcccttttgggtcatttctgccaaattctaatcatgccctaatttgaatagctcctcattcattaattcactcattcattcatttattcatcattcattccaaccaaccatccactcatctgtctacccatccatccatccatccatccatccatctatccatccatctaccacccactcacccactgatccatccatctatccatcctccaccacccactcacccactcatccatccatccatccatccatctgtccgtccatctatccatctactatctattgaagatttactgtctatctactatctattgaagatttaccatgtgcaagatattgtgctgagtgcatggaacttctaattaacaatatagtatgacaatggcaatgtggagagagccatccaacccatcttagtgtgtcagagtggtttcccaaaggaagttatacctacactgagatctggagcagttacctcggtgaacagggtggaaggtggtgctggtgcataggagagtaatccaggaagagagatgaatagagaaaaactggtggttgaaagaactgagaacagtttgatacagttaaagtataatgttggggtgcaaaggagaaggtctgctgagaaattagcctggatagtttagcatggaccagatcatgaaaagcctcaaatgcatggctaggggagtttagattttagcttgagagcagtgtgaaaattagactcctatgaggcagactggaggcagggaaatcaatcttctgcagaccaggtaaggggggtggggcagtgtgaattaaggtagatagataataagatagataattaaggagggaagattgatagggtttgaaaatggcttgagcccaggagtgagggagaatggggagttggagatgaccccagatttctagctggaactcctgggtggacagcggtataaggggcaaaaagggaaagattgctcagctcaggtgcgctattcttggagttaaggacttttcgaggccagttctctggtctagatttgctcagggtcaaggagcctgttctcttcccttggtgtcagtccacatggaatctctcctggtgggttccaaagcacatgactgccctaaacctttgccccaccccacgcaagcctgctgtcttgatcaagaaagactgaagctctctggtgccccagctcttcctctgcctctgattccgcttccttccctctctgtctcttgtgcccagagatgcgaagtgtgggaagatccagtgtcagagctctgaggcccggcccctggagtccaacgcggtgcccattgacaccactatcatcatgaatgggaggcagatccagtgccggggcacccacgtctaccgaggtcctgaggaggagggtgacatgctggacccagggctggtgatgactggaaccaagtgtggctacaaccatgtgagtcccctcccctgctcacctaggagccagctgcagagcagagtgattgagaagtgaggtctgagggaaggatgcctgggctcagatgccacctcgccaacctctgagccttggtggctcccttcatgaagcgtgtatagtgacagcaggcacccaccccagagaactgtcggaaggattaaagaaaatcatcccagtaaagcacttaggtggcctagctagtgccactttcatcctcatcgctaattatcataggaattaaaaatggactaggagttagggaagcctgagcaaaataatagcacagactctatcctccagagtcgattctgataatgaaactatggaaaacatgaagcatttagcatagcacctggcacagagtactgtcaccatcattatttttaaatataatgttaaaattgatacatattaatgacaagtaattaacataatcaacataatagtcctttaatgtgataacacataaataatattgtattgttaaatatgatactttaacaatatatttgtcgttttctccctaatcacaaaagtaatagcagaatttagttggctgttgtcctgtccttagcgttgtgggctgttttccatttttcactttgatagtaacctgaagtgtgctgcctatttgggccctcatactttttttcttttaagatggagtcttgctctgtcacccaggctggaatgcagtggtacaatctcggctcactgcaacctctgtctcccaggctcaagcaattctcctgcctcagcttcccgagtagctgggattacagacacaggccaccaggcccagctaatttttgtatttttcgtagagatggagtttcaccatgttggccaggctggtcttgaactcctgacctctggtgatccgcccacctcagcctcccaaagtgctgggattacaggcgtgagccaccaggccgggccatgggtcctcatatgttccaagtgcaaaatcttgcctcctaactcccaaccagcatccctcccattgcactgatcgttctgttttctctccgtgcagatttgctttgaggggcagtgcaggaacacctccttctttgaaactgaaggctgtgggaagaagtgcaatggccatggggtgcgtgctgggttctggcttctctgtgtcatggggacgtcatgagggcaggccctgtgggtggctgatgctctctggggtgctgatgcctctgccctttctttgctccaggtctgtaacaacaaccagaactgccactgcctgccgggctgggccccgcccttctgcaacacaccgggccacgggggcagtatcgacagtgggcctatgccccctgagagtgagtgccagcctgctggggccactgcccgcttttgtgagaagagcgggcatcaggggcaggtggcatgttgcagagcatccacattgaatcagcttcattgtcctgattttgtagagaggaaatcaggataaagacagaccaagagagaggagcgactgctcatagtgtggtgtggggacacggttcagtctctcttctcccatcctttctactgaggagggggagcccgcttagtagagtgagagtaagagagactgtaggtcattgaatgttcccattctttttaggggacacggtgactatttctctttgggcacttaaaaataatcatgaacctgggacacattatggtggtttagatttcctctgatggacacaagttaaaatggagaaccagacactcagaaaattttatagtattttagtggatctctcaaggattctagcactatgatttctaaagttttttttttaaaaaaaatagcaaataactttaaaaaaaaagcaccaaaatctttcaaggaagaaaccccaatatgtaaaactgataaaaagtagtgttttgttagtacaaatacgttctctatatttacattaaccacttgagagaatattggggtagttttgatgaaaccaaatgttaagttatggattatgggtgagatgtctagtcttaaatctgtctgagtcttttcgtttctttgttttttttttttttttgagacggagtcttgctctgtcacccaggctggagtgcagtggtgtgatctcgacttactgcaacctccgcctcccgggttcaagtgattctcctgcctcagcctcctgagtagctgagactacaggcatgtgccaccacacctagctaatttttgtgtttttagtagagacgaggtttcaccatgttggtcaggatggtcttgatctctttaccttgtgatctgctgaccgcggcctcccaaagtgctgggattacaggcatgagccactgtgcccggcccataatgtgtgtttttaattataatttgtaagttaaaataagtaatacaaattaaatgcaaatcaaatgcctgaagaagaagcacgaatacctattttgaaatctgctgtagccgagacagcttctaaatctcccacttgggttctgtttctggaaggtgtgggtcctgtggtagctggagtgttggtggccatcttggtgctggcggtcctcatgctgatgtactactgctgcagacagaacaacaaactaggccaactcaagccctcagctctcccttccaagctgaggcaacagttcaggtatgacagggttcaatggaggactcagggtcaatttatgggtcacaaaggtctccataaatggtacttagcaaaagtgttggtgatagtgggtctaattcagggaagacaagtgcaagatacatgctgccctctcccctgctatgactgtgacaggcattactagttgatcttattgtaagtactctactgattctggtcatcactcctgagttcttctcagcagaatatccccaaccaaatcaagttgaaatataaaataaaatctatttgccatcctttgtctagttgatttattccccattttattttatttatttttgagatggagtttcactcttgttgcccaggctggaatgcagtggtgcaatcttggctcactgcagcctccgcctcctgagttcaagcgattctcctgcctcagcgtcctgagtagctggggctacaggtgcatgccaccatacccagctaattttttgtatttttagtagagacggggtttcaccatgttgaccaggctggtctcgaactcttgacctcaggtgatctgcccgctttggcctcccaaaatgctgggattacaagcatgagccaccatgcccagccccctctttgtctttttaaccactgttgctttaaagtttgtttcatctggtataagaatagctactcctgctcgcttttggtgtcccatttgaaaagtgatgtattattttggatatggaagatgtacagtctctgagtcacctattaaataacacttgttctggaggggattttaagtcccaggtctttctggatctatgcctgatggggattggttgatggctcgtgacacccttgtgtctcctcacaggggaagggtcttaaaagggtgaagagaaggtgctgagagagctctgctttgtataaggccaactctgtttccttgagagttctccattggccacacgtttttctacttaggaagatgtggttcgagaagaccaatcccactccctccagagcagacttgggaaagatttagctgcttgctggccgtgcttgggtcaaagggaactcaggcactgtcccctgctgaacatcgtcccctttcttttcctcccccatttcttgtttctagttgtcccttcagggtttctcagaacagcgggactggtcatgccaacccaactttcaagctgcagacgccccagggcaagcgaaaggtaagagctttgcaccactgaactttgctacttttcctttatccctcagggccatgctgtatttttctttttgagatggagtcttgccctgtcgcccaggctggagtacagtggcgccatctcagctcactgcaagctccgcctccagggttcacgccattctcctgcctcagcctcccaattagctgggactacaggtgcccaccaccatgcctggctaatttttgtatttttaatagagacggggtttcaccgtgttagccaggatggtctccatctcctgacctcgtgatccacccgcctcggcctcccaaaatgctgggattacaggcatgagccaccatgcccggccgccatgctgtgtttttctaagagcctctgtgggcccatgggattggtaataaaagcccttttattggctggagagacatgttatttggttctgacatcccctaatgactttaaaggttgcatctgacttctgggatcctcaggggtttaatagattggtgtgtctgttctccctttgggctctggtttatctcaaagagacacacaaggccagccctgagtgatttcttgtctcaggtgttccttgacttgtgcgtacaggtgatcaacactccggaaatcctgcggaagccctcccagcctcctccccggccccctccagattatctgcgtggtgggtccccacctgcaccactgccagctcacctgagcagggctgctaggaactccccagggcccgggtctcaaatagagaggacggagtcgtccaggaggcctcctccaagccggccaattccccccgcaccaaattgcatcgtttcccaggtaagtggataatcagcaaccttgggctgggaacattgcttttaaggccactttcaatgggtaatggcaaaggtggggaaggtgaaacttgtggggtcatgagctgactgccttttctgcaattcagtcaatacgggggcgcacagcaggttagagcaacgaacgtggggaaatagactctctaagaagctcctaaaccatgtggcattttctcccgggttggcctattttatgacaagccactacccaccttccaccccatattaacttctgtcagttcccccatgctcgtctgcctgctaggtctttgtaaatgctgcttgttctgcctgatacgctccttctctccttggtggggccacctcctgctcatcctcagatctgctcctagatgccgcttctcccaggaagtctatcctgattcctcaattctgaggttgatgggactgtacttctctcatcatagtactcttcctaccaaattgtacctattggtaccttctactgattggaaagtcttagggatgtatcctgatgccttgcccatcccaaggggcaggtgcctctgggaggtgagagtggggtctagactctcccccaccagccctggtgctcttggaggcatagcctgcccagcagcctgttcccactgcgtgtgtgtgctctgatggctctgaccacaccttctgcaggagatcccccagtgcagacacaggtgtttcctgggtggcggccgggtggggtgccttctggaactggcctgtgtgttttgggtgtgacccctcaactgagactgctttctctgggtgtaatccagagggctccatggaacccaagctgtctctgaccctaaggactctggggttggctgcaggctttggagggtccttgggatgtgtggcagtggtacagtttgggaaggctgagggcatccattctgtttctctgctgtgaaactgctgctctccccttccttttatgtggggcagaggtaggatggaaaaatccatgcagaaagagaggaaagattgacagggagagagaaggaaagaggaaaggaaaaaagcaagagaggggaggagtggagagagagaggtggagagtgtactcgtgtgctgagggtgctatagcagagtactgcacactgggtggcttcaaaacagacacttattttctcacagttctagaggctaagagtccaaggtcaaggtgctggaagggttgatttctgaagcctctctctgtggcttgcaggtggccgccctcttgctgtgttctcacgaggcctttcctatgcacttctgcctccctggtgtctgcctgtccaactctcctcttcttatgaggacaccagattggattaggtggcctcattctatcctaatcacctctttaaagaccttatctctaaatatggtcacattctgaggtactcagggttagggcttcagcatatgattttttttttttaaatgatgagtgcacagttcagtccctaacagagagatgaaagaaagggagaaagcaggcgtgtagagacttggggttacaggagaacaggagtgccagcagagggaggagggagtgggtcgggcgagcagtccactcagactgttgttctgaaaaacccacactagaggcatgttcagagaacacggggccagcctcacccctgtcacccctaggtgctgagccgtaggtcaggaagtgtcagggacagcggggacccagctgtctgttaagtggtggaggctgtgcataccctgcacctgcacccctgggactgctggcaggagtcccgggtgcaggaagctgcccagccagtggcaggcaccccaaaacacagcccccaagcacagcttctcctgggccccgggtcccaggtgggtgtctctctacaagcgaacagtgggaggcagctgctctgagtgggggctgctgtgatgacattgggctgccacctgcctcctcacagccattccaagaagggagttgctgcagccctcatttctcttggaggttgccaggcctcataggattgaagggacttgcccgacattgcacagttgtgagtggaggagctaggacttgaacccaggtctcatccagctgagtgagacagcctcctgccctggggccactcacagtctccagtctgccatcaaagattccccacctcctagctgggggacatggaccccctggagaagtgatagatgaaacctcatcacttcttcagttctgctattctaaaccggcttatgcacctgcactctgggccaggcaatgacgaggaaggcagatggcagctttgcctccaggagctcacattctgctggggcagtgactctgggatatgtgtcactgcaacagtgatatgtgctgtgaaggagaggctcagggtgctcagaagagagtaacgaggatttgacctaatctgggaaatccaggaaggtttccctgaggtggtgacatttgagctgagacatgaaggaggaacaggacttaaccaggctgtgagggcaagtgatgaaggagctttcctggtcccaggacccactagtagggaggctctgtcatgggagagggccctgtggattgaaggaacttaaaggtttgtgtgcttgggtcccaaggagctatgagatgaggctggaaagccaggaggagcccgtctatgcccaggccacatagccttggtcaggactttggtctgtattccataggaagaggacagtggtgacatgatgcaattttctgttgacaaggattgatcactctttgggatatctttaggcaggagagaggtgtagttcctgcaaggggcccatagatgcttctgaagctgttaatctactgtttgacctgcatggggattacttagtgtattcacgttgtgataattcatctagttgtatatttatgatttgttcgcctttttctgtgtgtattatatttgaatttttaaaatagttttaaaaaatgaaagtcactctagaagcaaatgggtgtcctagttagaagatttaaaggttgtcctgaagaaagatggtaaaagcttggagcagggagtaggcagggctgatgaagtgaagctgatgagaaatgtgcagaagagaaaatagataacgagttgaagatccattgcttggcaggggatgacgccccgtgtcaggcttgtgcaatctgattgagtaagatgccatcccttgtggaagggagcatgggccagagtagctgagggactgtttctgctctagaaaaaggaaaacagtgctgggcgagggccctggtagggctgagttggatcatcgcagatgtggcctgtggctggttgccctgggaggcccagtgctgacatgctgatgaggctcctgcccaaactccagcccctcagtggctcatttgcacagctcccttgggagcacagcctttcccagttgcaacctgacatctgcacccagctgtcacctgccccagaaggtctctatcctggcttccagcaaccattgcaacttggcagctattctgagctggggaaggtggtggtgaagggggcgggttgtattgtccttctagatagagctgaagaacatggctttttggccttaagaatttgctttagtttctgattccatgaagcttcttggggaaaatctcggctctttgtgttattcctgccctctctatgtgcttgccttttgtccactttaatacgtggtagtgaccctctcgagaagggaaggaagtcaaggggagcaggcactggaactcccttctatgcagttggcttccccttaaaccccaacagcttgggggcctgcgggtgggacagtcattctttgccccttaaaaaacaatggatcaactaatacgtgttgagcacctactgtatactaggcactgttctggaagccaaagatgtatcagtgaaccaaacagatacggaccccacactgcttccactctagaggggaatggagagacacaaagtaaaaatcaactggataagtaaataaattatatatgttgtaaggcagtaagtgatatgaaaagaaaagaagaggtatattaggataaaaaggtcagggaatgtcagggtgggggctgttgtaattttaaataaggtagtcagggcaaagccttgtggagatggtgagaacatgaaggtaatagtaacacaggaaggacagaatccatgaaatgtgccacacacatggacaaccaacatgaacaaaatatagctgctgctttgtttaaattttgttttaatcttaacaggcaatacacgtacatgctcttgttaaaaaaaaaaaaaaaggaatgttcaagggctgggcgtggtggctcacacgtgtaatcccagcactttgggaggccaaggcaggcagatcacctgaggtcagagttcgagattggcctgaccaacatggcgaaaccccgtctctactaaaaatacaaaaattagctgggcatggtggtgggtgcctgtaatcccaactactcaggaggctgaggcaagagaatcgtttgaactccggaggcagaggttgcagtaagccgagatcatgccattacactccagcctgggggacagagcaagactccatctcaaaaaaaaaaaaaatggaatgttcacctggaacacacccctccccttttgcaccccatcccagtgtaatctctttggtctgtatccttccttttttctgttacagacatttctattaggcggtgagcgtgctgacttattttatgtcaactatcctctacagcttgtttgttccacctaacaactcttgaacatctccccacgccagcccctatcaacctacttcattctttttaagtgctatatcatctgtcactttataattttagttatttttctgctgatgaaattttgcttatttatagtttctttgctgttacaaacagtgctgcaaggaacaaccttgcagtttcatttttgtgcacgtgtgcaaatagttctctaacataggtcagaagaagtagaattactagatcagagaacagttatttgtaattttttttattatactttaagttctggggtacatgtgcagaatgtgcagatttgttacataggtatacacatgccatggtggtttactgcacccatcaacccgtcatctacattaggcatttctcctaatgctatccctcccctagccccccaccacccaacaggccccagtatgtaatgttcccctccctgtgtccatgtgttctcatttcatgttcatctcccacttatgagtgagaacatgtggtgtttggttttctgttcttgtgttattttgctgagaatgatagtttccagcgtcatccatgtccctgcaaaggacatgaactcatccttttttatggctgcatagtattccatggtgtatatgtgccacattttcttgattcagtctatcattgatgggcatttgggttggttccaagtctttgctgttgtgaatagtgccacaataaacatacgtgtacatgtgtctttatagtagaatgatttataatcctttgggtatatatccagtagtgggattgctgggtcaaatggtatttctagttctagatcctccctatttaataatggtgctgggaaaactgtctagccatatgcagaaagctgaaactggatcccttccttacaccttatacaaaaattaactcaagatggattaaagacttaaactaagacctaaaaccataaaaaccctagaagaaaacctaggcaataccattcaggacataggcatgggcaaagacttcatgactaaaacaccaaaagcaatggcaacaaaagccaaaattgacaaatgggatctgattgaactaaagagcttctgcacagcaaaagaaactatcatcagagtgaacaggcaacctacagaatgggagaagatttttgcaatctatccatctgacagagggctaatatccccaatctacaaagaacttaaacagatttacaagaaaaaatcaaacaaccctatcaaaaagtgggtgaaagatatgaacagacacttctcaaaagaagacatttatgcagccaacaaacatatgaaaaaaagatcatcttcactggttatttgtaattttaatagatactgccagcttgctctcctgacttcctcttgagaatataaacacattatacatacagtttctttctaaatgggaccatacagtatataacttttatctatctgattttaacctgtaagatatcagggatattttctttcaaacaggcctctggccttcaagtgaggcttattgctttctctccaggacttctccaggcctcggccgccccagaaggcactcccggcaaacccagtgccaggccgcaggagcctccccaggccaggaggtgcatccccactgcggccccctggtgctggccctcagcagtcccggcctctggcagcacttgccccaaaggtgagtccacgggaagccctcaaggtgaaagctggtaccagagggctccaggggggcaggtgtagagttgagaaaacaaagcaattcatgcttcttgtggtctggactgaacttccagaacaaaagccaagggcaaaacattcatgtttcttggtgcccgcttgactgtggagttttggcttcatgtgaaaggtgattcttagaatcctgagctgtggtggcttcagtcctgcccctgcacctgacctggggagggaccctgagcaagtccctcttgagtctgtttcctcatttgtacagaggctatgatgagcagtagtaccagccccatcaggttgttgtgaagagcaaggaagtgcattagtagaagccacctggcctgcgggaggctgtgtacacttggcccctcctcgtacttcttctgtgtggctgacagtctcagtttgccagtcttggcagtcaggtcagaaagggatgaggtgaagaagctggctgaccatgctgtattcccacgaggcattgagaaaactatggactgtgctgctgccttagcagggaagggaagagggaggggtggctggtcagcttgagataggggcacctaccacaccccttcctgcagggctgatggtctgggtgagtggacacatggatggacttcacaagaagcctttgttctcagtgggtggtccatccttccttctaaaatcgggaggatggctgcccccttgatcccattgatcagcatcaagctgatgtctctctccctcccttctttttcttcccagtttccagaatacagatcacagagggctggagggatgattagctcgaaaatctagacctgtccaaggggcttctccctttccttgagctctctggacactgcagaggacccatggccatggaaccctgaagaagcatgtctggccgcctctgagctcctcccaccctcctccaggaacctccacatctccaaaaatctccctgttgactcagtgcctcctcggcttccttggaagcccagagggactatgatctgatggcctctaggtgttgttttgtgcaatatacagccccaggtagggaggggagagtatgaggagggtgactggcagcttctcctccagactcctagccccgaggtgctgatggagatgctcaaggccagcaagcccctcaggccagcacttcgcttgcagaagccatccattcactcctggggtgcagggcacgcaagagagcttcccattgcttctgctctcctcagaggtcccgggctggatggaggctggtacttacccaccccttttagcttttagggattaaggaagggtcaagccagccactgctgtggccctgcccagggcttggttgagggaacggcttctggctgtatggctgcatgtgacaagccacgtcccctcccacctctccccaaacccctgcatccctgtattcacacgggtcactctgactcagacaggtactattcgtaggcagtgtagacagcaggaggagcaccgggcttgggcttcctctgagccgtgatgccaaaggttgcgactcctgactctggataatttttagttgctctttgttttctctgccgcactttcctggtgccccacgcttttctctcttccttcccctctcattctccctctaatgtgtggtgctttggtgagcaaaccctcagcagtcctgaccttcgggtgaccaggtgcttgtgacctacaagtcagagtcctctctcacagtcggccactggatttccctcactggctctcaggagtgtgaccagagtagacttggggcatggccattggggtcatatgtttatttttcattgtgttttgtgacctcagcagggtgggggtcttcctccttactctaagctaaatctaggtgaggtttccccttagggagcccagctatttacaaagtacacacgagggagcaggctggtcattgacttcgggctggaccgttgccctctgagcagagaacagacccattttctgggagctgcccgagatcactggagaaggcagccagcagcagctgcactggaacagtcagagcagggagcctcttcctcaacccagctttttgtcattcacttccttttgttctctctctggtcactgcccttacctgaccctcacagaaagagagctctgagcaggtgagggggtctgcggtggctcctgtcttccctgcagcagggaaggagggccgtgtggtgctttgctagataggacggtttttgcaaagcacctggagatgtttgctgggagatagactcccactccacaaaggtgctgggtggctctccggacaggagctggcctgactctcactcctctgaggctttcctggggcctcctcccatcctgccatgagcaattgtttgctcttgaaaacctcactgcaaggctgaggctgagcttctgattcaccaccccagggcctccttatagttctctgcacacaataggtgcttcttggatgttcttgggtttggaaataagtggaaaatacgggatgtacccctgggggaaaagcctgggttgggtttagaaagatctcaggaaaatgagtttctcttccctcagggtggctgtgatacaggttccccatgtccttgccgtgggtcatccttgctgtgggtcatccttgctgtggagatccattccccacctttcctgtggcccaaccttttatttaaatgtgctaccctctgcctcaaggcttggttcctggaaagtaaaggtgaaaacatcccctttcacccctctgcaaaacaaacaagcaacatcctcaaaacccaaccccatgcctcacagagcttcctgtggcttctccagcctttctccctcacatcaggaggtagatagctctgaaatgacagcgccacagccatagtgactgcatgagccatctgaacctgcagtccaccctccctggaaccacaccagaaagagacctgggttgtcgttttcttgctttttgttttgttttgttttattattttcatatcacctccatcccataaagttgtactgtgatctggaagatggtggaatgttttggaatttgatagactttcggcaaccagttctactaatgcttcactcctggctctgttcagggaggctgcccaggaggaagactggccattatgcatccccttttctttccagtgcccagtatgctgtttttgaggtgtcaaatacaaataaatctgggcttagggaaggagagaccttattccaaagcacgattgcagaaggggaaagggaatattgcaaaagggagaggaaggggccttatgggaatagtgaaaaggctcagaccgaccgatggcaagatctgcaagcgtctcaaagcccaggcagaaaaggacttttcttttattggaagaagtaaacatggctagaaagaaccacgttcagggaatgacgttgtgcccagcctttttttttttttttttttttttgtctccaggggaggggctgtttgctggctcaggctgaggatggcccaaagtccagggtctggtggggaggagggaagcttaactcaagtttgggttagtgagttagcaagctctttgtgcagatggggatgtaggtaaatctttttaaaagtgaaattaacctcctgccaattttacaacccaagaatttttttttaagggccttggagccatctctaaaacaaacctcaagggatttagtgccctgtctccctgtctctagaagccttagcctgggcacctggctcaatcttgtaactgcctgctagccatagattcctttccagccttgctgacttctccctataaaagtaaagcctttttctgccccagctctgagacacttgcagatcttaaggtctgagacttgctgattttctggttggagtgtttttttgtattgccatagtcccttccccctgaagcaatagcccctccccacctcctgcaatacgcctttccaatctttattggaagtctctccctgcctacttcctaatttattcttatttgacagagggtatggaagacttgcaatttgaaaactggggaccagttccaaagtcagtaattgtgttaaccacgtgtataacagctctgctggacacccaagaaagccatgggaacgccaactggaaaggtccccttccccaggggagcctgcgaaggagaggttctgtagaatccaagcccacatttccaaagtcacccccaacgcgtcctctcacaccgtccactgtgcgtttgtatgtgtctgggatccagggcaatgtgaattttctttttatttgggagattgttcacggaaaacagatcttcttctctcttgtccacctattaattgtttacaatatttgtacatctatgcaaaatacttgaatgggccatggtgccttttttccttgttagtatttaattaaaaatgaattgtttgtcatttgcaatgttatctggtttggcagctctttattgtgtgtttgttgtaatgtcctactgctcagattagataggattcatgacgtggacttcagaaagagttcccacaaggatggtcagttcagcctataaagccttcatggtggaccctgagccacagcaaagcctatgttttcctatgaccagtagagggggctgtttgtctttacacctggacgcaggctgcttattaaaggcctgaatgatcctgagattcttcgatatgttttttctcatcctacactactgcatatagaagacagctgagagcctctgctcacctcctcatcttattaaggcaagggatcatactttaaagaggggagacacttgccccaggtctcttgggctgggtaggcaggcacagccagggataaggttgggtgtgctttctgattccagaaccctgcgtgatatcacagctcgtattcattagtgcttcccagtccataaaaggatcccacccttattctctcattgatccctacctcaattttgaggttctctcagagagatggaggattaataaccatgatcgaaggtaacagttactcagtacagtcggccccccatatccgtgggtttcaaattcatggattcaaccaacagcaggttgaaatatttgaaaaaaaaaaaagtacaaccataaaaagtaatacaatttaaaaatacggtataacaacgatttacacagcgtttacattgtattaggtattatagaaatctggagatgatttaaagtatatgggaggatatatgtaggttatatgcaaatactataccattttatataagggacttggccatccttagattttgttatccatgggggtcctggaaccaatcccctgcagataccaaggaacagctgtatttaacatacgtgagccactcactgcatgctgtttacaaataaggattatctcgtttaatcttcacaaaaaccctgagagaggcttcttgctctctgattttactttttttttttttttttaagacggagtctctctctgtcacccaggctggggtgcagtggtgcaatctcagctcactgcaacctccgcctcccgggctcaagcaattctcatgcctcagcctcctgagtagctgggattacaggtgcccaccaccacgcctaatttttgtatttttagtagagatgacctcaagtgatccattcgcctcagcctcctgaagtgttgggattacaggcgtgagccaccgcacccagcctgattatatttttctaacctctcatggttatgaggttgcctatggaccctaaagacatctaaacacaaatgctttcactactaacatgcctgctcatgaaattgcttcccactcacacatccctacctggttaagaggccactcttcccctgctgtcagccagtctctggggtgatgctcacgtgttggtcactagcataatggagaaagcctggttgggcagaccctggttgaagtcctcactctgcttgctactcaatagataagtgggcctggataagttccagatttctgagtctcttcactatacaaataatatacctgcctcaaaagtgtcgtgatcatcaatgaaattctgtatgtgcaagtccccaacagggcctgtcgcaggctatgtgctgagaaactgctgactacatcagtttacagttgctttgcttaacatgcagagttctattaggatctgccttgcattgagtgctggtccccaggagagtttgggcaaggaaggactgtgatattgttccttcaatcttttctttttcttttattcttttagtgcgtatgatgtgctaggcactgaggataagcagtaaatcaaagccaactctcatgaagcttatatccagatggggaaagagcacagatcacaagaaaataaatgaataaagtagtagcagattatgcacaaggcacagtggctcaggcctaaaatctcagcattttgggaggccaaggtgggaagatcactttaggaaaggagttttgagaccagcctgggtaacatagcaaggcctcatttttaccaaatctgagcctgggagtttgaagctgtagtgagctaggatcacaccactgccctccagcctgggggacagagccagaccctgtctcaaaacacaaaaaaccaaaacagattatgcaactgggggcaaggttagtcttggagagacacattacgcctggtggttaaaccagatatcagctttgctcttcctggctgggtgaccttgggcaattatataaatgggaataaaaacgtatctaacttgaggatttgtgaggagttaaagagaattcacaggaagcacctactatgcctggtgcctggtaagggctcaggtgttaactagggatgagttgtcttcaactgactctatttctgaaactatctttcccactctaccaagggtgttaactaccacagacacggtaggggctttattggcagtcgcattcattcagagattggagactgtccttccagccctagaaaaaccagtttaatcactccatgctcaaggaaggtcaagacacaagtatcaagtaaatataatctgtaatctttattcttgaccctgcagaccacactcttagggccctcagtttactgccattctcaagagccaacttgttgcattgcttttaattacagacagaaatccacattcatcaaaaactggggatttgaggctgaagagtcagggagccagtctgctggtcagccaaaccttggagttccaaggccagcaggaatttacctgggcttggcccacttagggcacaggatataaacacagagtgcaggtagagtcacacaggggaggccctgcaccaacctcggggctgaggatcaagtcttccctctttccagatacaccagcccactaatttccctttctaatggttcttctccaacccccacactcttgtggctagaaaggagataggaagggaaggaatagtaattatctccctctccagctgctctggttttttgtatgcctctggccaaatgtgaggggaccaaaggtactccccatagcaggtggtgttggaacagtcagggcatgctgcttcccagtgtgggcagctcatcagtggaggaggggactcggtagcaatctggtcaacagctagaatgcaccccatgccaagtctgcacctccagttggccattgagattcacagctgtccaagcctttaaggctgcaacccagaaattacccctgagctcgtttctcctaagttcccagatgagcaccagagtcaacacaaaagttagcccctagtatccagagagcctgggactgccttctgccaaatcccaactttgctcctcatcctcttcccacctccccagatcataggttggttgactccttgaggaatagtaaagtgcgttctgccaaattctagcttggcagccaggccactttgaagcagtgaatttgctgttcttctttcagagtaagacaaaatgcaacactgggtttggccaccagagtttggctgtggctctattattgttttgtttccagttctgcgattactgcctttatgtctcagtgaccgactccttaggatgtaagtagagggggaaggggtgatggtgggatggactgggtggatgccgaggtgctgactgccaggctggagtgctcggggaatgagctggttgaaatttttccctgagacatcaagtggctttcacagtaagaaggtcagctgaggtcttgcttctgcctccaaagaggaagtgacaaaggcaacaggatattttacactggttgtgtccctgtcagctctggatagggaggcatggccaattgctctgtgggcctctgggagccagctctatgtcatccttgggctagaaaacaacaacaacaacaacaacggagattccgtctcaggaggagaattggtgtgaaggaacttccaatgaccaatatcttagagaagtccttggactgtgctacattcagtgggtcagactccatcttcttcccaacggcatagagatggcaccgaaagaatgaatgagaaggaaggtccagggaacctgcaggcactgatgtaaacttgggtatttggtcactgaatctgtttccaggaagttctgccaccattgctatttgggtaaagatttttctcctggaaacagtgatgaggtataaatgaacttctcaagaaaagagagcccattggtaacagttgcactggaaaataaccaggtggttttgaaattgggagggcaggctgtaccatcggactcatcctctcactcacatattccaagcttcaggaatggattataaatactttgggtttctcttctggtgatgaggtgctggcaagttctatattgtccacaaggacgttcttgtcttccagtctaataacagtgggttccggggcgggagaagggggtgggtttttgtgcatgtggggcaagctggcgcagctgatgtccaggtctttgaacccatgcagcatgaacacgccaagatgatggtgactagcccgagaggggtgcttgcaatgtccacagcagacatgctgtaccactccttgaagaggatgatggacgaggtaacgaccaccgtggtgaagaacacgtagtagatggggaacaccagggaagtgttgaaaatgtccagtgctctgttgaggaagttgacctgagtgctgagggacagtgccaggatgagggacaggatgtaggggagcgggtgccggacaactggcagcccctggaagaagttcttgatggtgatgcccagccccttgacagcagccacagagaaggccccgatcacagagcagatgatgatgtagatgaggatattcctttgcccgtaacgtggggcaatgacaaagatgaggatgaggcatgacaccagcagaagcacagcaaacacgatgaaccctttgggaggagagagagaaggatcacttggctgtggagggtgcaggcaatgtctagggcccagactcatggcagtgggaggtagcattaagatcgtgggctctagagtcagacaaacccgggttccagtcccagcttcatgacttcctaataacttggttaggtttttaaacccccaaaaactcagtttccccatttgtaaaagaggaccaacaataggatcatcctcataaagctgttctgtgggattcagtgagataatgtatataaagcattcataacagtgcctggcacataataaacacttattaatggtacccatacatatcaggccaggaagcctttaagctagccttgctaacaagtaccagcccattaacatttcttctttagcttgccttctcctctaggtggcagcacctgaggtggtcagaacccaacctgaccttttgtggggtagtagggggtgttcaacctccagtattttcctgctcttcaggggcttggagtctacctgtgtctttcatcttggaagccatctccatgatggtagtgaccttctcttcctcaggagcatgtatcaccatcactgtgcttccggccacacagatcacacagcccagcttccccagcaggttcagactctccctcaggaaatatgaggagaggatggcactgcacgtggaaatgggagaaggggattagagcagccatgcctgtcccagagtcccaaagaaaatggggcctgagcaagcactcacagagaacaacagatcagaactcactagtttctcacgtggaaggttttcttccaaaaaaacttacgttaccatgggcaaatcatgtgacctccctaagcctcattgtccccatctgcaaaatggggatgctaataatatccacgggagacattgttctcaggaactaaatgagataatgcacagaaaatgcacagtacagagctggtactgaagaataaacacagctgtcacatatggagggcttagtatgtgctgaacattctgaatgtatcccgcatattaactcatttaatcctcacagcatccctagctgaggccaagagaggttaagcaacttggccagggtcaccaggttctaagaggccaggctggaattctaacccaggcagtctaattccagagtcagggggcttaactgctatgccacattgccactgaaataaaccctcatcaaatgtctgatagttttaaaaacagttcatacgaaatatctgtgcttcccactgcccccagtcctcctgagctggggccaaaaaatgtttgatatagaaactcatttctgggagtgttacaatatttgctggaggaatagaaatgcaggtgaatttcttccattttagagactgaaagtattcccaaacagaagagttggaagaacacttcaaaatgctcttgtctaactgccttcccaatggacacatcctctcttagcactgccaacagatggctctcagctttggcttatagatacctctggtggcagggagcccaccccttcacaagccaaatgaggccattgtaggtttgctctaatcatttaccaaaaatatgccttctggtaatttctattttttgctctatctctgctcctcgggtcattcataacacacctattatttcatttgtataagccagtgtaaacaacctcagtgacaatcacaggtaccatgtcttaggcatttattacctactatgtatggtgctaggaacttcccgtctatcacactagcatctcataactctttgcaaagtgaaatatactatctccagttgataaatgagaagactgaatctcaaagaagttaaaatgacttggcaaggtcaaatgactagcaagtagtggaaccaggaattgagctcgagtcctttctaattataaagctcatgggttttcttctatgcctcgttgaagaggatccttgtgacttccctgagtcttcaatttctgggcaaattatctccagttccttgctgcaccgtggtgacatgatttctattcccctcatatcctcgaggcgagccagcagaagcaagagaggaagggaaaaaaaatcacaggcaagcctcgtataatcacgggggcatgcttctgtctcttcatgaaggtggcttagtttagggtaaaaacctattggctatctcaggacattggctatttttagccttaaaaatcctggttcaagttgtcaggagagaggagattgatatctaagctctcttgtctgtcttccgtctttcctctgaaactaccaaaaatattttggccgcaatgtcccattcaagagattattcatgcaggcaggggccacacactggaggattttatggctctcccaacttcccccgggtaggaatttgcaaactaatcagatatgcaattatggtaccacagctacatcagctgtgttaggccagttatacagcatgaatcaggcgagttgtacagcatgagttctatttgttttttgagtgtgtaaatgttgcaaaattttcatcaagatggtaaaacaaatgatgggtactgggtgtggtctgctacaatttaccggcgttccaaggttacgccaacaatcagagtctccttcaaatagggctccaggacccccacagaggagctggctctgtgtttgtagctcagggggactaggggcagtgggaagcacagacatttagtatcaattatttttaaaactatcaaacatttgttgagtgtttacttgagaggcaatgtggcatagcaattaagcccactgactctggaattaagactgcctgggttagaatcctggcctggcctcttagaagctggtaactttggccaagttgcttaacctctgttgggctcagctagggatgctgtgaaaattaaatgagttaatatgcatgatacattcagaatgttcagcacatactaagcccctactatgtgatagctgtggttattgtttggtcccagctctgtactgtgcattttctgtgcattatctcattaaatcctcagaacaatgccccccagtgggtattattggcatccccattttgcagatgggaaaaatgaggcttcgagtgactaagtggcttaaatgacttgcctatggtaacgtgactactaagtggcagagcgaggattagaccttagagcattgacg

SEQ ID NO: 6 - DNA, 22693 bp, Homo sapien
ctaaagggttttgtttatactttttctccaaggcttttgttgctatttctacaaagttgatattacccataaaatattttggggagacggacacactgtgatttatccagggatctgtacccctttaggaatgtcactttatggtttatgtctttgtcttatatacctttcttctccttttcctcctggtgaattccaacttaaattttagaaacctaacttcatcatcacctcctttgtgatatgtttcttgacagaattaagcagtccttgttagtgcatctgtgccttgtacatacttcttttgctgtatttatcatactgcagggcatttctatgtttacaggtgtttcccctaccagtatgttaacttcttgagggtagagccatgtgctcagtatttgattacttaactgactgggtagtgatagaggagtaacatgaatggctgtccaggggcatcagcctggtggaaaatgttgagagttggtggtgcacaacattattgtggctctctgggaaaaggaatttcttaaatcttctttctactctgtgaaggttctaatgggagaaagcactgatatttgtaggacctagaattcttcttacaagttttatttttatttatttatttttttgagatggaatcttgctctgtcgcccaggctggagtgcagtggcacgattttggctcactgcaacctccgcctcctgggttcaagcaattctctgcctcagcctcccgaatagctgggattacaggtgtgcgccaccatgcccagataattttttgaatttttagtagagatggggtttcaccatcttggctagtctggtctcgaactcctgacctcaggatccacctacctcagcctcccaaagtgttgggattacaggcatgagccaccgcgcctggtcacgagttgtattttttacataaacaacaattaagagaatttaaatgagaaaacatacccacagtgtcactatcaaatcatcagctattttcatttttccctgtttctggaggtatttattcttaaaatgttggattgcttctataaagtgttttattgtttcctgtattttaattttacgcaataacccctcctgattttaggttttaaatgccttgtagagagggatcactgtcataatgcatttttatatcaactttaccacttaagctcaaagcaagtattcagattcttgactgatattattcaagccaacaaagtatttttagagcctataatagttcagatactatataggctgtcagtatacaaaattgagtaaggtgtaatccctgcctttacaaaagttgtaatcgaggagtcataactaaagtaccaagtatacatactatacagaaatcattcatagagacgaatgtgagttgcataggaaatatttatattactacccatataaagttcttgaactgaaccaaggttaaagaatgacataataataataataattattattattaattattattattatcatttgagatggagtctcactctgtcacccaggctggagtgcagtggtgccatctgggctcactgcaacctccgcctccttggttcaagctattctcctgcctcagcctcccaagtaactgggattacaggcgtgtgccaccacacctggctaatttttttgtatttttagtagagatggagtttcaccatgtttgccaggctggaggaatgacataattataattattatcctggcatttgttcatttaacatacacttttgagtgcctactgggtgctaaggagtagcccccaattagtctctagaacatgtcattttcattatagcaattctaactcgctgataatagtttgcttatttatttgtgttttgtatgtttgtttgttgtctatttttcccccctagaatgtaagctccatgtgaaaagcacctagcaggcacttttttttttttttttttgagacggagtctcgctctgtcacccaggctggagtgcagtggcatgatctcggctcactgcaacctccacctcctgggttcacgccattctcctgcctcagcctcctgagtagctgggactaccggcacctgccaccacgcccagctaatttctttttgtatttttagtagagacagggtttcaccatgttggcccggatggtctcgatctcctgatctcgtgatccacccgcctcggcctcccaaagtgctgggattacaggagtgagccaccgtgcccggccagtaggcacttttgagtgccaggcactcttctgggaatacagtattgaacaaaacaacatgggctcttttcacatggagcttatattctagtggggaaaaacagacagcaaacaaacacacaaaaaccaaataagcaaactattatcagcaagtaagaattgctataatgaaaatgacatgttctagagactgactgggggctactccttaggtggcaatcatttaagatccctctgaggaagcgacatccaaactgatacctgaatgacaagagggagccagccttgcaaagatctgaaaagatttttaggcatagaaaatagcaaatgcaaaggccctggggctggtacacagttggtgtgtttaaggaacagcaggttggtgtgtgtggctggaactgcactaaactaacaagaaagtgacaggacatagggttggaaaagtaggcagaggccaggtaatgtaagaccttctaggttagggtaaagaattttaattttattctaaatacagtggcaaattttggagaattttgagcagaggaatgatatccaatttacattttaaaaagctctttgtaggaaattcatagttaggaggtgattatggtagtccagggtggaaatgatggtgacttgtctaagtgatggtagtagctggtagcagtggagataggaataaatgaaaggatttgtgatatattttggaggtagagttgacaagactgggattaaatgtggttggttaaggaaagagaggtttcaatgtcttgtaggatttttgacttaaacatctatgtagagggtcatgcaatttaccaaaatagggaggaataagtttgaagatgggattggaaattcatgttcttttttgagaatgttaaatttgagttgcctgttagacttctaagtagagatggcaagaggatatgtagttctggacttcatgaaagaagtacttgtatagaaatacaaatgtggtagctgagagcagtggctcacgcctgtaatcccagcactttgggaggccgaggcaggcggatcacctgaggtcgggagtttgagaccagcctgacgaaaatggagaaactctgtctctactaaaaatacaaaattagctcggtgtggtggcacatgcctgtaatcccagctacttgggaggctgaggcagaacctgggaggcggaggttgtggtgagcagagatcatgccattacactccagtctgggcaacaagagtgaaactccgtctcaaaaaaaaaaaaaaaaaaaaaaaaaaaaaaagaaagaaaagaaaagaaaagaaaagaaaaagaaaagaaaaacacaaatttggggggagtcatcagctcttagatgtatttaaagccatgaaagtggatgaaattatacctatggaatgagggtagatggagaaaagaaggaggtccctgtactgatgctgggggattactaacaatttgaggctgatcggaggaggaatatccagaaacaactttaagagagtagccagtgagatagagtaaaaaccagaagtgtgagatgtaacagaaaccaaaagaagaaagtgtttgaagaaaggagtgatgaattgtgtcaaacattgctgagagatggaggaagatgaggaaaggagatgactgttgaatttggtgacaagttgggatgtgttgaggaatcagtaggtgggaaagtggagacagagaacatggacacctaattcaggattttttgctatgaatggaagaagaaaaatgggacaatgggtggaggtgatatgaattcaatgttttattttaatgaatgatgttaaggcaggtttatttgctgatgggaatgagtcaacagacagacaaaaacttatgatgtagcagaaggaagagagaattgagtggagtccttgaaaaggcaagaaaagataggatctggaaaacaactgcaagtgctggtttttgacaggaacagggacagttctttcaatgtaacaaaagaaaggtagatagtgtgagtacaggcatggaaaggttagcatatttggtagtaggaagaagggagaaagcctgtctgattttttctttcttccatgacatagtttaatttatcaaaacaaaataatatgcctaccattatgtacaaaggaagtatgctagatagtctctagatagtcttacctaagatattgtttcagtatccatttctctctaacaaaccacagttgatccttaagcaacatggggttagggacacggacatcctctctgcatgtgcagttgaaaatccacgtataatttttgactcccccaaaacttaacaagttagtagcctactgttgactgggaagactcgtcgataacataaacagtcaattaacagatatgtatgttatatgtgttatacactgtattcttaaaataaagtaagctagagaaaagaaatgttattaagaaaagtaaaaggaagaaaaaatatatttactattcaccgagtggaagtgggtcatcagaaaggtcttcattcgcatggtcttcattttgggtaggctgaggaggaggaggaaaaggaggaagaggaagggtgggtcttgctatctcaggggtggcagaggtggaagaggtggaggaggtggaaaggcaggcaggagaggcaagcacattctgtgaaacttttattggaaaaaaatctgtgtatatgtggccccgtgcaattcaacactgtgttgttcaagggtcaaccatacttccaaacttagtggcttaaaacaacaatttattacttctcactttttggtagattgactaagtggtccttctgcttcacaagagttggccggggtcttgagaatggtgaagtgtccagaatggcctcactctcatggctggcagtttgtgttggcagccagctggaagctcagccggggctgccagccagagtccttggttttcctctatgtgagccttttcacacaggtggttgggtttcctcaccccatggcagtctcaggggaggacttcctacatgttggtcagctggattgtttgggagggattcagtattaggttagtttcagctttggggaccacattttataatttatctactcatacaatccataactgagaaacaatatccatattttgacttactaattaagactgtctgataagaattcttaacaacaacagctgtgatttttctcagacctagaaaataagtaaagcttcttttcccctttggtgacttgaatttcttttcccaggtagaaaactgccacctgtcaccaggactcctcttatttttctgtgcacatggcagatttatcctgggtgcaaaatttaaaagtcccgtttcccccgccacacacacactagttacagcattttcctgaggcactgtcaagtaccaatgaaaagggagcattggctccgtgatcacacacaggaaaacgaagaacccttgcttctgaccccctggatgtaaacacagtcaatgtgaaactatacttaaagctttgtgtccccgagataatgagaaaaggaaatctgaaaaagtggcatgttcatgagtaagaaatggtggcgtccagaatatggaagagagctaactgacaaatcccgaaatcatgtcgcttctgggaaaagccacttggcccatacagatatcccctatagcttttcattgcaaaaaagttggaacgtaaacatgataattcattataaagtgaattttgttttcccttgaagttacatcacaaaaaatgcaaacaaaaaatacctgaaattgaatataaaattccattagaaaaatgtatttttggtgaggaagtggtagggaagggaactagtccgtgcaatattttagccttgtatcacccttggaccctcatgtctattagaaattgaaattatggttaagctgaaaaaccttatctttgccatgttttctgtatcttacagcattttccctacttttgtcaccacctcccctttccaaaccatggaaatttcttttatatatgaggttctttcacaactgaagggttctttcatatctgagggctgtgcaataaactttctacaatgatagaaatcttctgtattttcactgttcaatacagtacccattagttacatatgatgactgaatgcttgaaaagtggctagtgcaaatgagaaacataatttaaaactttatagttaattttagttacttacaactaaaatataaatagccacatgtggttggtgactaccacattggacagcaaagcctggtgtctcacttgtagctcatggaattctgctcctctttttctctagatgatgaaaaacctgagctgatggacaatgcccgtaagtgtattgtgatattgcagctcaggtttttcattaatgtaattactacaaataaatactatatgatagtacttagtagtgtactataagatagtaaatatcatataatatttatttgtagtaatttgattaatgttgtatccctcactggatcgcaggcttcttaggagtaaggactttgtctgctttttcctcacttttatattatgcccggcacctagtacagtatctggaacatagtaggtgctcaataaagatatgagtaaatgaatgaattaaagagtatccaaacatctttgatataaatgagaaatgaggactccactatctgctgtgtgtgtgtgtgtgtgtgtgagagagagagagagagagagagacagaatgagagagagattgattctggagaagaatctaaacatatggagaggagacaaagaccaggttattaaagagaaatataattgattgcataatacttcagaatcagaaaattggctttattaatagtaagactcttattaagcatttactatatggcagactgtaccctaagtactttacatgaagtatctcatgtaatcctcataagctaacactgtagaatacgtactattattatccccattttacagatgatatggaggatgacaggagtaatttgctggaggtcacacagctagtaagtagtagaacatgcatttaaacccaggcagtctgggttcagagcctaccttcttaaccacaatgctgtattgccttctgtttgattatgtccatatggtgacagaagcttagtgacctcaaatgtctgcatcagttcttttgtctaaatttaagcttcggtaagccagtatctcctggaggtttagcctctttccagtggtgcacgtggaggggaggtgggaatagtagtataaggataataggatatgaaaatctgtactggattcttttttctcaaagagtcaaacaaatatttttatatctaggattttttgccttctaataataaggggaaaataaaggcttctcttgaataaaacaaaatgcaaaataatatctcccccttttccaaatctctggtctagtaagagagatgaatgaaagctaagagttactgttatcttcgtatgaatgagagttttacttcgctttccctctccccttccctcctctctatcataaatttagtgctccataaatagtccaaggttggcattcctatttaggtgcttctttgtttcatgtaagaatagcttatcttcctgcgctagttatactgtttgcccccagactcccacccatcagattcactctttgcccttccctgtcctgcctggaaccctgtacattgacctctgtgggttccctcatcctctggcttctgactgtggttcattcagcagaagcttggcatgggggtaggaggaagagcagaaaggagagactagattgtttcttcccccttctttctccctactttagtgccacattcttgcaggagctgcctgacggccccttcgatgtggctccagtacttactgggatctggtgacacttcttcttcacctcacccctgtatgtcgagggaagggaatgttttaccactcttgcaggcccctgggtgtctctactgagtcttgtttcccttaacttggcccacatctttgtagatagtccctttaataagttattttcagtaaactgttttgaatagaatagtatttcctgcttgggactctgcctgatacattttgcctctagtggttttcaattttcttaatggctggaagatgtacttccaaatagatataagattaaataggtctcaggtagattgttccacaaactggattttgagattgtgtcgcttcgtttccaacattgttcaggggagagataagctgaatgtagcaagcatgtgtaccctgttacatgtatcagagatagctcatcaggctttttttttttttaacaccttgaatgaaatgaactcaagattattcattccctttgcccagaaactctgatcatcgagcaatcttgtgattactaaattggtttcctaggtattgtgatccagagaaaggggtatcttgtagggtggacaccaacagttcagatcgtggaaaagtttaatcctctcttatattagtcaaatggatttctttaaagaaaaaaaggaagaatacagtgtcccttcttccccttccacatgcataccacctttttcctttccagcttgcattcctcttttctctctctttttggtttttgttttcgcttatggcttcagccctgtgttaaaatgaagattccattactcagctctataaactaatctgtatccattcttctatactgtgcccatggtctgtcttccttcctgttttgataaaagaataatttttcttgtcaaagaccagctcctctctttgtgctcttacgctcatctctcttgttttctcaaggatttccattcctcacttactatccactttctcccacaacagtttctttcttcttcttagaacattcccattgccatttgagcatgctctgacatctcctattttagtaaaaacccttccttgactccatatccccctccaactagtgctcatttctctgttcctctgcacagccaaagtttttgaaacagttgtttatactggctggcaccacttccttacctttcattgactccattctggcttccttccaggaagccatcactccactgaagcagctttagtcaaggtcattagtgacctccatgttgctgaattctattgccacttctcatcttactcagcctcttataaacactggacacagctgaccaatccctttttaagatactttcttcacttggcttccatggcaccattcttacagttttcttttcctgattcctcctcctctattcaacctctaaactttcgttgctgagcacttgaaatgtggctagtgagaaatgagatatgccataaagcataacattgactctgggtttcaaagactcagtatttaaaaaatgtctcatgaataattttttatatgggtacatgttgaaatactaatattttagatatattaagttattaaaattaatctgtttctttttactttttaatatggctactagaaaatgtaaaattacacacgtagctcatatgtgtggctcacacatttctactggacagtgctgttctagaaactcttccctatcaccctttttatttcatcatcttatgtagttctacagctttaaataccaactatatgttgactcccaaatgtagacctttaactctaacctcttattttaagccgagacttacctacccacttgtacttgaatttccatttgcatgtctaacaggcatcttggtattaatatgacaaaaatggaattttctatttctttcaactactgaatttctcatctcaaccaatggtaccatcctctgtccaagccaaaacttgagtcatctgtgattactctattttccttgcccacttcatccaatctagcaagtcttgttggttccatcttcaaattatatcttaaattctgtcaatttttctttatctccatggctactacacaagttgaaaccactgtcatctctcctagtctactgcaaaaaaaaaaaaaaaatgaccaggacaggacactgccagcttcctaactgatctcgctggttccactcttgtaccatgacagtctctgccccatacctcagagtgatctcttttaattataaatcacatggtgtctacttcaaccctccagtgacttcccattgtgcttagaaaataacccaaacttactttagtttgcaaggcccagcatgagtctgatcactacttatctccctgacctcatcccataccactcttcttccttgttataacaatctctaaccccactggccttccttccctactttgatcgtgtccagcttattatttcctcaggccttttgtgtgggattcttccctttgcttcaaatgctcttctcccagtgtattgtgtggctgactcctcttcattcttcatgtctcagatcacattctgtcttcttagagaaaccatgcctgtaagcactgtcctgtcctggtcatttttttttttcatggagtctctctctgtcacccaggctggagtgcagaggcgtcatctcagctcactgcaacctctgcctcctgggttcaagcaattctcctgcctcagccttccaagtagctgggactacaggtgccagccaccacgcccagcttttttctttttttgtatttttggtagagacggggttttaccatgttggccaggctgttctcaaactcttgaccttaggtgatctgcccacattggcctcccagagtgctgggattacaggtgtgagccactgcacctgtcctgtcctggtcattttcaatccaatcatactcatacacctcgctctttatttctccatcttttctttctctcactgaaatttttttttgtttctttctttccttttggtgtctgtctccctttacaagtgtaaactgttcaagggcaggggccttatatgtcttatttgcctctacgttcttagcatctgatagaaagtttggaacagagtaggcgctaaagacacttttgaatgataagttctaaaataagtattaatcaaatggatgttttaaaagaaagaatgaaataaaaatattattgggatgaataagttcattttgaaatgaataatatgggatgtcttagaaatgaaggcataaggagttttgcattatgctttaacagatgttaatcctttagtgtgactgagtttgtcatatcagcaaatattgagggcctagcatttgcaaaacacactgtctctgcccttagaattgagaaagccaagagagcagtggggcactgagcctctgagatacaaaggggaaggatgacattaaaggagaaggtgtgtgtgtgtgtgtttgtgtgtgtgtgtgtgtgtgtgtgtgtgtaagaatcaagaacgggtgcccactcaacagataacagcccacctgactccaattttgcctagattttgctctagcaggaaccatggctattatttctttagcatctggggcagtgctatgcctagcagatttttcaataaatgtttctggtagaatgaataaatacatttaggaattataacaaaaactcagggaaagtaaagtcttaaaattactgacctcggatgatattgaagtgtctagaaaccacatgaaaaagaatgcacatgaactaaaaactgtaaagtagaaacagatgaattgaacactcgaaggtacactagcatgaggatttgggactaagaaaataattcctttttcttgtcctgcttcacgcccccagagttgaatcaacctcggagttcctgttgacctcaggagaggattccaaaaacacaaatcaggaaaacagagtgggggaaatctttgaaagttaaacagcaaaaacatccatcttgaggacatctcattttttcccaatccaagttagatctgctatgacacgtaaaagaaaatgaatgatggtgttgatcatgaatgtattatctggttgtgacaatactggacagatatatctgtgtccagactatacttctgctatggtctattttagggagcttctggattttaatctaaaagtgatatctggaaaagagataataatttgtgttcacatagcactcttcatccaaaggtctcaaagcactttacaaagaaataattattattatcccagatggaacaactcagacagaggggctgctgcccttttcagcaaattggggagtggaagcccctcgactccaaacacagccataggctataaactattgaatcctggcctctcttgattgggaactggaactatcaattagaagccttttttttttaaataaagcagaacatcaggctccaatcttaagaatttcagcatgtgttcaaaacatatgaaagtgaatgcttttaaaacggatgaattttgggcaaagtatggctgcttaaaataagaaaagtggttattacagtcaaactaataatggctaacgtgctgaacattattctaagtgggttatatatattattttatttaagactcataacaattttaatgatgtaggaagatatatcattttactcattttacagttgaggaaactgagacagagaacttaagtagctaggccaaaatgtcagtcaagcaaactggcagagctggaattcagacgtaggtagtttgactccagagccttcactcttagcaagttactctgtgtccaggtactgtgtgaaacatttcacatgaattatctcacttaatccttacacaacttctaagaagtagatattttattgggggcccctcccaataaaggaaatcagagaaattagagacctcttagatgataatgaaagtgacactaagagactgcctcttacccagagagctgtgacggtgctgtgcatgaggacgtgctttggcaatggacaagcttggattagagtcccagctgtgtctgtcatttggacaagttattaaacctctatacattttccatttgtaaaatacaaagtagttaaggctcagaaatgaaaagacttaaaaaggtgaagtggccagacatggtggctcacgcctgtaatcccagcactttgggaggctgaggtggggggatcatgaggtcaggagttcaagaccagcccgaacaaaatggtgaaaccctgtctctactaaaaacacaaaaattagccgggcgtggtggcacgtgcctgtaattccagctactcaggaggctgaggcaggagaatcggttgtacctgggaggcagaggttgcactgagctgagatcgcgccactgcactccagcctgggtgactgagcgagactctgtctcaaaaaacaaacaaacaaacaaacaaaaaagtgaagtaacttatccaagctcacgttccagtagaggtggagtcaggcttttgaaaagtagacaaaagagaactgggccaggggtcaggaaatgagggctgttcctgccgccaactaggctgtgtgaccttgagcaaatcaaataatctccatggtctctgtgccttcctctgtaaaagaaggacatcaggctacattgatactaaaacctttcccagtgctaacattctgactctcaatatctgttttctgtttagtcccttgtttgaaaatccttggaggaaaagaaattaaccacagaacctgaaagtgactctggaagccaaatttagaaaacagatctcaaaaggagaaaaaataagttttcaaaatttctttatttaggaagcgagactgccctgcaaagtgtttggcttgatttgtgagactcagtgaccagataaaggccatacagatctccttgactagccagttctcctagctgcagtaagccatgtaacctggttcagtggctctttctggcctgctatcctggctaaagctggaagaagcccatcctgtgtgggagggatctgagaaaagaagccaagcttttcatgtgggtgttctatcttgaattcagaatgtctataccattctgtctacttctgtttttgttcttagtgattattatatagtgacacagcccactgctaccatgaaccagtttttttcacaaccttgtggtaagccacggtatagtgaacaggtctggcttccatttctctatgtggttctattcaaaagtgtgagcttgagtttgtgataaatcttggcaaaaagatatccatagctttgtgatcttgggaaagtcacttaaattctccgtctgtcgattttcctcatgtttttgtaaaataatgcttatcccacgtgctcttcggtgttatgaatttcaaatagtgtatatgtggaagtagtctgaggaaattagagacctcttagatgacaatgaaagtgatgctggctgggcgcggtggcccacgcctgtaattccagcactttgggaggacgaggcgggtggatcacttgaggtcgggagttcgaaaccagcctggccaacatgatggaaccccgtttctacaaaaaatacaaaaattagctaggagtggtggtgggcccctgtagtcccagctacttgggaggctgaggcagaattgcttgaacctgggaagcagaggttgcagtgagccgagactgaagaagtgagactctgttaaaaaaaaaaaaaggaagaaagaaagtgatgctaagagaagactgtctcttacagagagctgtgacggtgctgtgcgtgaggaagtgctttggcaatgagcaagcttggattacagtctcaactgtgtctgtcatttgggcaagttattaaaccactatgaattttcaatttgaaaaattcaaagtagataagacacagaaataataaacacaaagcttccaacaacaagccattaatagatgatgcctattattatttttattgtcagttattgaattacagtgcagagttagcaggtttggaatactaggtcttattttctaagtcatacatactaattcactgtgaacttcaggaaaaagccagtataaaattgggctgtccttctaggaaaccaaataccctaaatggctgaggccaatttcggaagcttatcctcacatacatcacaccttgaggaaatctggacaggcaccttcctcccctttatctttttttttttttcctttttgtggagaatggggtctcgctatattgtccaggcaggtcttgaactcctggggtcaagctaccctcccacctctgtctccctaagagttgggattacaggcatgagccactgcacctggccctttcttccctttagaaaactctgcctaactctccactttctatggctgcaggaattctggtaatctgctggagtctcaaaatttacctcggcattctaagtttatctgaacaggatataattatagcaaaataattccctatgctttttagcataagaatcccattttaaggtaaaaagagttttaccccatataatagtagttcccattatatagaatattctttctgtttatagaatcctatataatagtagttctactttaagtagactttgagaaaaacacatgataaaaattcagcaacattaacaaattagaggatcccctcttaaaatttttttgaatagctagtacatgaacttgatataaaattcacgaggtacaaaaggaaataccatgaaaatatccttctttcaccccatccctcattcacacactgcccttctccagagcctcctattgtttcaacttctgctgtatcttttcaaaggtaaatttgcactacaaacatttacatatttcatcttaaaaaaagacaaaatggtagcatcttaccactcttcttcatcttgctttttttcacttagcaatatcttgttatattttgttgtactttaacatggatatgttgaaaaaaaaaggtggggagcaggtgtggtggttcacacctgtaatcccagcactttgggaggccaaggcaggaggattgcttgagcccaggagttggagaccagtctgggcaaggccctatctctaccaaaaaaaaaaaaagtaataataaagaaaagaaaagaaaagaaaagaaaactagctgggtgtggtggcatgtgcccgtagtcccagctacttaggaggatcacttgaacccaggaggtcgaggctgcagtgagccatgatggccccactgcactccagcctgggcaacagagccagatcgtgtctcaaaagaaaaagagagtccgggcgtcgtggctcacgcctgtaatcccggcactttgggaggctgaggcaggcagatcacctgaagtcaggagttcgaggctgctctggccaacgtggcgaaacccagtctctactaaaaatacaaaaattagccaggcgtggtagtgcgtgcctgtagtcccagctactcgggaggctgaggcaggagaattgcttaaacctgggaggcagaagttgcagtgagctgagatcacaccaccgcactccagcctaggggacggagactctgtctcaaagaaaaaaaaaaaaaaaaaaaagaggccgggctcaatggctcacacctataatcccagcactttgggaggccaaggcaggcagatcacctgaggtcgggagttcaagaccagcctgaccaacatggagaaaccccgtctctactaaaaatacaaaaaattagccaggcgtggtggcaggcacctgtaatcccagctacttgggaggctgaggcaggataatcacttgaacccgggaggtggaggttgcagtgagccaagatcacaccattgcactccagcatgggcaacaagaccaaaactctgtctcaaaaaaaaaaaaataagagagagaggggaaaataatatttttattcttcatgacatgtgctgttgaaaaattgtatcgccttttttttttttttttttttgagacagtgctctgttgcccaggctggagtgtagtgtcatgaggctcactgcaacctctgcctcctgggttctagcatttctcctgtgtcagcctcccaagtagctgggattataggggagcgccaccacgcctggctaattttttttttggtagtagtaaagatggggtttcaccatgttggccaggttagtcttgaactcctgacctcaagtgatccaccccactcagcctaccaaagtgctaagattacaggcatgagccactgcacccagccgcattttttaatatacagaaaatcctagtgaatatttttaatatacagaaaataaataccacttagagattctcagctcttagattgggaaccaccagtataagtaaaatattagtaatcttcaactttaattttggcccttactgtgcaccagacattgttctaagcactttacatattatctcacataatccacatcctcatcatccttctagtctcagcttaaatgttatctcctcagagaagccttcccttatccaagtagacctatcctctcccctttccattattctctagcatttcatcctgtttatttccttcaggacactcagcaatacaagtaattagttacccatttgtgtacttatttactgttgtcttcccagtcagagtatgagctttgagagcacagacatgtactattgaacagtttggttcaccacagtacatccagtaacatacagtgcctcagtgcttggcacagaggagccattcaattgaatatttattgaaagtacatactgagcaaaaaacagctttacgaagtagaccctattattttctccttcatactgataaggaaactaaggcctagagagtgaaatagactcatcccaaagttggtaagtcacagagttgctttaaaacccagctctgctgggctccagagcacaagctcttcactatgaccctggtctcaggaacagaagactgagttcagtcctggctgtgtgaaatgttgagtaagtcccctatcccctctgggactttttctttcattgtaaaatgaaagagtggatgtcgctatcttccttatggtgatgttttgtgatttatgaggtctgtgatctatgaaaatgaaatgggggacactgaaggagccaagaagattggcttgatgcctttaagcgtgccgattttcagttattttcttccttctctccttctttcactggagatttgctaatccttattttatgccaggcattgtgttggaggtaataggaatccaaagatgaataggatatatatagtccctgacattaacgtgcctggcctgatgggagatgcagacccattaaatggctgcttgaaatacggtatgggccagtatcccaacagtaatactatgtgtgaagctcatggcaatacagaggaggaagggattaattccatcatgtatgtgttggtgggagtagaggtggatatgtaggaagggggatgcggtataatgctgagctgggccttgggaaaataagttttccatgtggtcaaggtggaggtgaggctttctggacacaagagacatcatgtgcagaagcacaccaagaaagagcatgaagtgctgaggattgctagagtggggggttggctctcaggatatgaagctggctaggcaaagggagcccatgaagagccttgctgaggagtttgaacttaacttctgagagcagtagcatggccaaattgtacttacattttatttttagaaggatcactctggcattggtaggactggagataggtgatgaggtgaaaggagtggagaccagttagaaggcttagaagttgtccaggtgagagatgatgagggcttggacttaaggtatttgcagcagagttggagtggaagtagataaattggagattattttaaaagagagacccaaaggccttggtgattaattggatgaggaagaataaaagatgagatgaagggacttattgtaatggattgatgtagtctaaaagaataaaacagtggcattaataattataggggatttggagtgaagtggaagaaataatgatgttggctttggatgtattgagtttaagatgtctcttagctaggaggaaaggtgtagctctctctacttcctttccagaatagcagtcctagcctaagtcactcatccttggaccagtttcctgtggagcccagtgcggtataaaattccccaagagctcactggcattcctgagctccacatccttcaaggttaaaagctgggtgttgaaaactccctggaccctcattgataggctaatggattatggacctgtgtgtgtgtgtgtgtgtgtgtgtgtgtgttttaaatcagatgctggctccagtgcagcaaactcttctgcctcttgcaagcatcagccttggaaacaaaacaaaacaaaacaaaaaaaaccttttttatggagcagcctctggccctgacaggctctggctctctgttggctcccaagaagccccccacctttcttagagatcagatttttaaaagatgaggttgtacagtgctcagccagatccccacgtggccgctgaagaaagcccagagtgttggggactgggccctttctcagctaccacctctgcttgggtgtcctcaatgctaagacaagacaccttgtggcccaactctttccaaaatgacggggctgggattctcccccacctcaagtcgaatatccagcgttcaccaggcggtggcaggaccgagcacgtggtatcatttaggggctgggctccagggtcctcctaggaaagaggacagcccaagaggcgagaggctggccggccaccctggccatggcaacctctctggctcctacagctgctggccaaaggcagggggcacgccctgcgtcccattaccacgttcataggatggtgccaggagcccgttatctcttcttcgccttctcctcacgcaccacccccactgtcatgccgataaatcccgggagcaaagggtggcacgattcctcccgcgcccctgcgggctgaaggcgggcactaaagcagtgcagtcccaagcttcccctgcagaagccgcgctccctactcggtccgggggcagagggggcgcgagagagcaagtgggcgggcgtcccatcctccgcatcctcctccaggtcctggcgcacagggtgggagcgctgcgctgcgccgcgctgcgcatcgcggcccgcttgccgcctgccccctgccctagctgggccacctccccgggctgccggtggagggctaagaggcgctaacgttacgctgtttccggttttccagcgggctctgtttcccctcccaaggcggcggcggctgagcggcggagccccccaaatggcctggccagatgcggcaggtttgctgctcagcgctgccgccgccgccactggagaagggtcggtgcagcagctacagcgacagcagcagcagcagcagcgagaggagcagcagcagcagcagcagcagcagcgagagcggcagcagcagcaggagcagcagcaacaacagcagcatctctcgtcccgctgcgcccccagagccgcggccgcagcaacagccgcagccccgcagccccgcagcccggagagccgccgcccgttcgcgagccgcagccgccggcggcatgaggcgcgacccggcccccggcttctccatgctgctcttcggtgtgtcgctcgcctgctactcgcccagcctcaagtcagtgcaggaccaggcgtacaaggcacccgtggtggtggagggcaaggtacaggggctggtcccagccggcggctccagctccaacagcacccgagagccgcccgcctcgggtcgggtggcgttggtaaaggtgctggacaagtggccgctccggagcggggggctgcagcgcgagcaggtgatcagcgtgggctcctgtgtgccgctcgaaaggaaccagcgctacatctttttcctggagcccacggaacagcccttagtctttaagacggcctttgcccccctcgataccaacggcaaaaatctcaagaaagaggtgggcaagatcctgtgcactgactgcggtgagtcgccccctccctttgctggagaaaggggggaggggcgaggtggtggagaatgggggtggggcggggaggtgctgcaggtgcccgggcctggcagcgtccgggcgctgggggggtggggccgcccctgggcagggcgcctggcacgggtgggtgagggggttggggttggagagaagaaggatcaggctcaaagtgtgccaggggtggggggcggagggaggcgctggcctgtgccagcggggatctgcggctgatgtatggcatgtggggctggaaagctgccatcatagcccagtagcggaaggaaaaacggagaggtcctggcggtgctggcctgaggctcagtgagtcaggagtgaccctcggaggccttgcctgccctgctgccgcgggcctgccgtgcccaggctggcagggtctgcgggagcagctgggcagactcccaggctgtgaaggcctccgcttacaagttctcctagggaatggtcgcccccgccccctccttcctctcctgggctcgttgctctgctcatccacaccgctggcgcaggcagagttggactttttctgctactgttttccgtcctccatgtggctccagtttttttcttcatcgtgattgcctgtctttgctaagcaggtagcacatccttctcttaagactagcaagcagacacctttttttttttttttttttagctgtttctgggggaattacaaggtctgttgattgtgatgatgatgaaagagagtaacttctgctgaatgctttaagttcagctctaacgtcttactcgccggatgtatttgactgcatctctcatcttcatgatgttggatgctgcacaggaatgcaggtgattagaaacaaaacactgaaatctgtagatctctgcagctgggaatggaagtctcccatgtcaaaagtcaaagaaatgtcagtctaagagctttttcttcttgtccctgaatccagtacttacttcttagtaagatatttcaaatcaaattgtcccacactggagtatttggtgtaagcctgtctcgtgcttattcaaattgaggtttcgttttgtcccaactaaagctgaatttgttggcatgcggtatgacttgctggactgtgtaatcgctgaattatgatagatgtcctgtactctcatagaagttggtatgtttaccagttttaccaactgattctgggtagtgtagacaggctttgtttgagtagcaaaatatgtgtaacagcttatagtaagttttgctgccttcatctttctagatcgatacctatgatttttggaagctttcctcccccacccccttcaggaggcaaattttaggagtttagtgatgggagtatatctagacactaactatgttaaactgtgatcactttaatgagaagaatcggggtttgagggccaatggaacggaaacgacgatagacgtaat

SEQ ID NO: 7 - DNA, 45450 bp, Homo sapien
  misc_feature (1)...(45450): n = A,T,C or G
tttttagcttagtgggttttttttttttctttctcatttgaacttggagtctgtaattaacctccaataggttgcagtcacttgtgggtgggacaggggtgggaagggggctggcctgcagctggccagcagcaggacagtgggaaactttgatgccaggcaggctggccacattgtctccaggtgttgccctgcaaagggaactgctcagccttagtcatgaggtgaggatcattaacccttttaagagcctgctgcccctgcccgctgggtgccgggagggaggcagagccaggtcctccctggctgggttgcccagccatgtcctgagcgtctgtcttgctctcagatctgagtaggctccgcacccaccgcccactgccgagaggaatgaggttaagctgctggcagcagcggcaccccctggtctcagggctgggatgtgggaagagagcagtcctggttgttgttgctgttgtcgctatctttaatgaggagcttcctggggatggcctgtcaaacagatacaggccagaagccctggcttggcaccaggagataggaagcagaagccaccggataccctgtggcccaactcatggcaaccatggggaggtgtcctaaagttttatggagcccgtcctggaggaaaatctttttgtggaggcctgggccatccttgagagagcttcttgttcttataaagctgccaagggagacctccccacatccccacacctcaactccagtgaacccttgtcccaggaggaagagaatggatgaagtagcctctgggcttcccccaaaacccaaggagtatgggagctcagcagagggtgcttggtctgaggaaggaaaccttaggggaaggaagagctgcccaatacccaaaaacctgtgtaggccatcagcttgcccacctgcccctcttcgtctctggggaaggagctgctgcagggatcagggtgtcagtaatggccatgggtgcagagtgctgggaactttctcccctttcttgtgcacacagaacttcctcttgcttttgctagatgcctctcatctgtccactcttctgtgtgctggacctttgagggtcccctttctgcatgagaaaatatgcatgaacccccaggactgctgctcctcccttcagccacaaagctgaatttatggagaaattcattgcaatattgttattattagcagaacgttggagacaacctaatatgctcatctgaacaatgaaatattatgcagctactgaaatgattctagacttggaaaaatgttttgaatgtatattgactgagaaaaatgggatataaagcattttggagagaaaagtcttttggcagacatttgaaaatgcctacagtggctttctctctgttggtaattgaattgatttaaatgtgtttttctttttccttacttgtgtaattttttcacaacaaaaatttcttatgtaacaaaacaacaacagaaggggacaagctaaactctttgcggagtaggggtggttactccatatacagcggatcatttctgtctggggccaaacacagaacctggctcatagcaggcattcaataaacaggggaaaggagaggtgctcaatactcaagggcccaagtagtccatcagcttgctgcctacccctccatctgtggggaaggagcagcggtagggatcagagtgtcgactgaatgggggataaatgcctgcccactgcattgcttcagttctttccctgacagatcccatgcatcccaggaagcctgttcctctgcttggttcagctctggccccaagacattcttgagacatggtgcgatgatctctatacccatacactagcattgtagtgtgggccctgggctgtaaaagagaaacaggcaataccagacctagctcagagagggtgtctaggtgaggggccgatctagcccagtcatgtctgaggtcccgttagagctgtctctggatgcataaatgtctgctatgtgaacagcccctcagccttatcccacatgaccccagggcctggtactagatccaatggctagaggatgcatagagaaaggatggtggctcaggataagaatgagcttaacatgcagaaagtaagatcaggtcatcccccaacttatagcctctaatgccttcccagcacacctacaaaaccaatccagggccatcttggggaggtcacctcaatctttgccacagaaaacctggcagggctctaggcccaggagtgcggatgtggaggacattgttccgaggccatctggtgtacattcttctctttcctgccacctgagctgctgccactgccccctgaccccaaggaactttcctacaaggtttgcccaaccctggctttcaactttcaaatcactgcaaactaggattgcctgtgagcaaagaccaggacttgcagctgctagagcaggaggcatggcttttagcatcacagatgattccgaggaaccgttaagagctataaaagaaaactctgtaaagaacgtggcatgattcaaatgtatggttatttttattttgtcatcctttaaaccagggctgtccaatagaaatataatgcaatccacatatgtaatttaaaaatttctagtaggcacataaatagtttttttttaatgtacaaaataaatccagacttctcatcctggcttgcacagccccatgtcaacctgggccctacctacctctccaggctcccctcagaccctgcccatcttctactatcttccagccatataggcctcttttggccccatgaactcatcaagctcattcccaccttagggtctttatccagctgctttttttttttaactgtctcatatttcctgttgatgttttgtttattgtccccctcactaaaattcaggctccctaacagtaggatgcttatttcttggtatggttgaatgaatgaatgaattcatttggaatgaactgaataaatgaataaggaacaggtgaactagatagggttgttctgaagtgagtggactatccagaaatggctactgagtcacacaaggttctcactagatggagtgggctccctgtgatctgaaatgcggtcctgtgttttccattggtggccggcgattactttggagctctcagttcctcaggccctctgaattagggccatgcctactgtttctgggagcagtctctatgcaacacatccccctagcccatcaccatcaccactaagcagtggccacaggctcagtgcataatacagcactggaactcatgtcaggaaccaaggtggtagagtaacccctgcttcctcccaccagcggccaccgccatcccccaccatcttgttgggagggaagtggctcatgatggtggagacaggcagttcccttgtctctgagttgcaagaaaagtcaacacactccaagtgaggtaaggggaaactttagcacctgataagagctctctgtgttgtgtccccagttcataagaaaggagaagggactagttggaggtcatcacttgaccaagaggttagatcatcaccaggtgtcaacccaatcttagcacaaagccacctgtgcatatgtgttcagtttgtaaccagtcattgagctatatacacttataatatgtgcactttcctgaatgtatgttacatttccaaaaataaaggaacacacctgaagagccctttagaacccacaacccgaacccacactcacagcttctgcttcagaatgcctaggatatgtcccaggtacctgacttgtaaagcttcccatgtgattccgattagcatccagggttaagacctaacataagcaatgactggggactccagagctagaatgccacggaagggaacgggaggtgggtaaggnngaaggaagataaagcaggatttcagtcacacttagaataatgaagttccaaaaagtccaacagattgttagattgatgcacatagaatctctgggtgcccaaaaataagaagaatananagananangnanagantananangnaananngnanananganananangananananganananagaaaaagacgaagaagaagaaccagcaatataaaaaaagcaggtaactgaggggaaaaaactttgtagcaaaaggttaatagccttaatatttataaaaagttcttacaaatcactaggatgagcactcgataggaaaacagactgcatgcatgaacaggcaattcaaaaagaagaaatacaatgggccaatacactcatgaaaaatgttcagcctcatcagtaatcaaataaatgcaaattaaaatgacaaagagacgttatcttttgcctagctaattggcaaagattaaagacatgataatacctcgtgttggtgagtgtgtggaaaaaacaggcactgtcattcactggggggagcgcaaattggtgcaacctttccaaagggcaatttggcaatgtacaaagctgagaaagattgcataccttctgacgcagcaattccacttttaggaagatcgccttaggaaataattgtgaataataataataatagctaacctttgttaaatgctctctatgtgccaggctctacatgcattgtctcatataatcctcacagccatcatcccaagaggtaagagctattatttatctcctgtattttacagctgtggaagttgaggcgcaaacgaatgaagttaattcttggacacaaatctaacaagtagcaaagtctggattgaaagccagacagcctgagtctagagccatcctcccccatacagcagtatacatggggtgtgtgcaaagataaagctgcaaggatgttcttttggggttgtttgtaatgggaagggggagggggcatgctaaatgttccacacaggaatcagttacataagttatgatacacccatacaggaacattatgcaaccatgaaaaatgatgctgtaagaaaaactgagtgtgtgaatactcgggggtgcgggatttgtatatgcataaaatatttctgaaaggaggtcaaaggaacccataagattgattatctcctagaaagacaactgtgtggttgtggccagaagttagagagagacttgttttttaatccatatacctcttttcacttcttgaattttgaatcatgttaatatctgtcaaaatatatgtttatatatatatattcaatggaatcattgttgaaatatatatatacacaaacaaatacacatataagtcatagaatttgttccacataactttcatttccttgaaatgctaccaagagttccaagaaaaaaggtttcaaggcccccacttagagaacgatactgaagttgatagatacttctttaactatgcttaacccacatgctctccaaacccattttcccatggaaccctcttgtcaagtaatatctgttttcatctctccagatactcctgcttatagaatacactttgggaaatgctattattaatatttaacacccaggcgaaagggttacactgtttcattaaatgaaagaatacatagagcctggcacatagagagcatttaacaaaggttagctattattgttattattatccacaaatggcattgattccattttgtttaaaaatggggggaggtgttatttatgagtatggagacaaaggaaggttttgttttcttcttttttcactcctctgtattttttcattttctaaaatgaacaaaattattttacgagaatcattgtgtaagcctacgtcatacatttttaaagtcttcctttctgtgcttcctctgtgccctgtgcccctctcatctactccctgcgtatatgcagcagctcagggtgaagttcaatgaggggacccctgttctagccaggccctcttgcctgcctttctccagagccagctctggcccattgtcagcactctgagttgctagggaaaggaccaatggccgagacagggccaatcagttcccagacaactccctggctccaacagaccctcccttctgctactggaaggcttttaaccatctcacagagagaaataagaccacaaaatcagacaccatcctgctaccagcctaacacgtggcaaatcttgatacctgagctttggtcccagctctgtggctgcctggctatgtggcttcaggcaagtttcttcacctctctgagtctcatctgcaccatcagtgtcagtatgacactgcctcacagaggtcagggaccaaacgagagcctgcatgaaggctttgtgtatcctgtaagggactatcccactggaaattgttatacacctcagcacgagcactggcttagcctcatcttcctgagaagagagtactttctctttcagggtgtgtgtgtgtgtgtgtgtgtgttgttttgttttgtattttggtggtggggagaggagcaaggaagtgaagcatgggagactggggcatgcggaaatagaatggcgtttaagaaaaatggggacagcctctcagcttggcatttgcagctttgcatccgtgattgggcctgagcccaccagtacagccccatggcttgttacccatgattttagatcctgagcactgatgtcaaggagatctgtgtttgaatcccagttccatcatctgcccttagggaagtgacttcaccattccgagcctctgtttccccatctgtaagtgggtttaaccattgctgtgagctcatggggttactgtgaaggtttcataagctaatgtaaagcttcataccattcaaggcatgaaggaaactctccataagttataactacattgatgtcatcacagactcattataaatgcttattgaattgaactaggaaatgacactaggaggggtggctctcaggatcacccttcccttccccagttccagcccaaagacagtggcccttactctccactactcatgcttggcactgcccctaccaccaccgtgctcacctacctgccttgtaacccacagccacccggcccaagttgaagaagatgaagagccagacgggacaggtgggtgagaagcaatcgctgaagtgtgaggcagcagccggtaatccccagccttcctaccgttggttcaaggatggcaaggagctcaaccgcagccgagacattcgcatcaaatatggcaacggcaggtaagcaatatccagcctgtcctccatccaagcagctgccctccctcctctcgagaaggagtggcctgaactgggcagaggccagggctgtgcccccagactcacccatggaaccagtcccagcccctctccatactccccttccttgccactcccagccttcttcctgcagctcggggaccctctggtcatggtggcccagggtcttgcagaccacagacaagaattaagcctttaacttctctggatagttgaaggcaatttgactgtcacagtcagcttgatcagtggaagaccctgctcatctctaaaacttcttgaaaaacctgctgtagcgtctgaaagccccaacatttggcaatctttggtgaaagaccctgactccagaatgcctctgggaggtcacacatgatgggctggtttctcagcttagcaagctgtcagttgtcagagagctaggtaagggaaaagggagcaacactttgattggtgttggagaactctgttcctcagacggtttccccctaaaagttgagaattgtctttaatcctgaatcagtgctccagggaagtgaatcagagaagttccctgagtctctaggctatgggagatggcctgtcttccatcttggctgggtcaggcagggggcttctggcaccagagaagccgctagtccaaggcagcccaccacctctctgctgcctctcaaggagaagcaagggggaaaacccctgcctgccagctaaacaggcattctacctgatgtctgctctgttggctccggggacctagtggccttccctctctgactgaggagctcccaaaccttttctaccctccctcccagagtagcttacaaccactcctttcctggctgtcattttcctcctcaccgccccaccacacacacaaaatgcaaattaggatggttttagagcacaccagcctgcccacaacaaaaagtggtagaaggccagggctgggcaggctgcttgggtttgccatgtggggctggatgtccatgccctgcctctggccctcagactctggaacctgtaaaagaggttaaaggagtcaggggactgggagttacttccagttctctgattctccttccaagaatggggagcagaagtaaaactgatcactcaagaaaatgatcctggcagaaaacagaatgtaattaaggaagagtttggcttagatcaaaggtttgtggctgaaagaatgccgcttcctaaggaacttgccatggccagtggcgagtggggggttctatatgtcccttgtctacagcattggcaagaagctctggctgcccacccagcccaccttccgagaccaccccaccccttctcactgccctaccaaggctgcttccaagctggagagaatgggcaggcttcttggagctggggcagttgggtcccgtctccctcctatcctttctttctagaagatggtttctcccctacttcactgcagtgacgaaagtcaggagagcccccctttccctcctcatggctcccaaacatgtctacaacctgcctatcatcatcccaccctacctggtgccacacactcatactcaccctccctcccgcacattcccccccaccacacacacacacccacagagccctggtaccaccaactcactcctttctctggtaacttcagctttctctccctaccaacaaacccacgcccgtgactttttttctcaaatgctgtccctccacgctgctgctcccctggccctccagcggttgccccatctcacttccgccctccaccaccatatgaagtcactgagggagctagcctcatgcccactgactgcgcactctcgtcctccactcactctttgacctgctggaatctgcccttcagttacatcccaacctctcgatggctgtggtcctggagaaaccgcagttatctttgcacttcctggctcaggcctccaggcctctcagcggcctcggcctgggaatacctgctccccgggccctgtggtgctcctcctagtcttgctgtgagtctggacactgtctcttagttgccatcaatgctggaactttcctgagctttgggcctcactattttctttcctccctttccgcctgtgggtgatttcaccttctcctgttgctttaagaatctgagaccccaagtctccatatccagacacaatggcttttttacctgagctccagacccatgctgccagagagacactagataccacacctgagatgcctcacagacatttctgattctgaaggcccaatctggcctctcccctgcctgctgtagtcctttctctccctcatgtgttcccctctcaactgtggctcaaccagactctctgctgctcaacccctgaccctttgtcgtctgcccagggggtcgtgcctctttccctcctcctgcacatttcttatctggcctccctgcctcgagccttcctcctctgtcccactcttggccactccccaccttttctggaccacaggcccctctgagaattcatttctgaatctaaaatatctgtattgagtatcaactatgtgccaggcactctgctagaggctcaagatatgtcagtgaacaaaacaaaacttaccttcatgagtctctagtctagcttctactatagaatctggtagacaccttgtccttttcttcaggaaaaaaaaatgtggcttatgtacccagtttgtttgtaattctagaggtccacagagtcactgacccccatgagtgtctgacgggaaatgatctttctaacaggaacatgtattcaatcatccattcaagacagagcttgagagcctactgcatgccaggtacagccttggggctcttccgactcctcttcctggcctacaagtcactgccatgcagtttcctcacactgccacactctcggccgctggtctttcctttcatggctctggacttgggcccaggctgttccctatgctggcagccctcctcccctcacttgtccctggcaaggctctccaaggcccagcttaactgtcttctctctgggacaccttcctaagccctctaggcagctctcattgtctcctcccatggtgccttagacatggcttcattgctttgtagagggatctgtctctccttccagcatgagagagcctcaaagcctggatccctgtacccagatacccccttctccgctatagaacctgacagagagctctacactgagggctgaactgacgagaatcttgcaggactagccctcctctcctgggtgtagagtcccactgagactgggcatgagaccttttggatggttctagccttctgaaccagttactgtcctggttaagcctcagtttcatctaaagaatccagaaacagggactggtcttctcctcctgggtattatggacccctaagagtctaaagtgtgccccctgctccctacctttcagggccctgccccatttgctgcatctggaaacttccctgttctccctgttcttgccctgtggctctcagcagtgagttgtcagtggtggaggagtgggccatcatagagaacttctgactccctgcgaccaaggcgccctcggagtgacttagagagaacggccacctgcacacctacccatcctacactacacatctcacctagtagaggggccaggggcagtggcaggagtctgctttctggcaaaatgttctctgtcttgtctgcccacacaacagctggctcccctacctcctagcactctccctgcccgggccgcactctgtctgggcatctctgttgacctgtagagacccctcctcagagggtgctgtctgtctttgtgcccactgcactgaaacatctcacccaagccttcctgtgccaggagcaaactgcccccccaaatcctgggcacggggccttccctgcagaatcgcatgttcccttgtttatgaggggcaggctggaacaggccccttgagcaggcagggggcggggggcgggggtaggcgctgaggaaaatgtggaggacacagctgcccagatcctgtccctgccagcagagaaccagctggggaggtaggggggaggggggagggcgtggtcaccatctcagggcaaacttgggtcagcatgtgatgggacaccaggagcagagcacagcacgcggcctgccagggagacaggagagtcctggatcctcaggcttccacctggagctgggagtgaggagggagaaggtggtgactccagttcctgcaggggctgagaaaccctcagagccctgccccttagccaggacccagagccccgtgtgcatctctggggccggcttctatgaaatcatcagacagctgctaacctaggacatctgcagcaagcctcagggtcattatctctgtcccctgcctctttcttgttcctcagaaggaaggggcactcctagagacctgtgcctgccttctccaggtctcacatgcctgcatgtggggaatccttccttaacattctgccacgtcctgctacatatgatgctgtataagggaagcgcctctgaattccaggggggtgacaaggagaatctggctctgagtcccctgtgcatcaacacccccacccccggaccctcaggcgatcccccttccctgctaatctggtgtgtgcacagggaagtgagagaagccataccctgggcaagctggagtttgtggcatctaatttggctggagcagggaaagagatgctgtcttagtcagaggggcctccagggctctctttaatgaagggaacaaattataattgacagaagagggttgtgggccggcaccaggccaaggagacagagaccagcttgagccaggaagaatatggtatagttaagcagctgtcaccacagcatcagcaaggacattaccatagcaatagggtctatagacaagaccatcttgtagcacccttgttgggaggaccttggggtaaggatgccaggatgcctgggaagaggctccccatcagaggtggagacagcccaggtagggattgtgggccagtttgcgtctccttgaccctggcccagcctatctgcttgcctctcctcagcctccttaccccatcagctccatagctcagttttacatcccctaggctcagggcaatgatggctctactgccctccctcgtattcccccatctctccagcccactacacataggctggaaatctggctttttaattcagcactaaaaagaggaggtgatcataccatgtgcagaaattaccgtgttacttcttgcttcctcctgggggccagcctgggatcccaggctttatccagagctcatgctggcccttggaggcagaggaaggggtgagggctgtgaacaggcccttgcagagcctaagcaccctggggtaggtgcagggaaactctgagaaggaaggagaggtttggctggggcttcagaaagaagagggggaccaaggccaggtgccctacacagttctcagcatgcagggactaggtgcaaagcttcagggctagccccagcttttctcagagatagcccacgtcctcatgaactgcagctcctggcatacctctgcctttgccttgccgagtgcccttgggcaagtcaggaagtccctctaggactcagttttcccttctgtaagcagagaacacccagtttggccctgaggatcaagtccaggatctttttgttccccaaggtgtacaagctcctggcacacaggaagtgctcagtaaacatttgttgaatgaatgaatgaaacaaaaaccccttggagaagccacagagtgccccttagtggcagcgctgattttgagaacaagggagagccccaggtttggactaggagtctgggcaccatcaccatgggaatccgtcaggacagctgccctcccgggtatctgggaacaggtcttgcatacccagaatgacaggttgccacttcccaggagaggcagaggcagctgggaatgagggaggtggccatgtgacttcctacagggcctggctttactcccccagaagaatgttacaatggtccagccctagaagagcggatgtgagggatcatagatttaggacatgtgagcagccactagtcctgccctgtgttgtcctaagggcccaaggctccctgcagctgcagggactccgtgccccacctggactccagaaattgctggggggagggaatctccttcccatctaagctgcagggccactgtggctctgtggagagaggcaaccgctgggtgactgctggggagccacagccggccctggctcacgcctctcccccttttatcccctccctaaccagaaagaactcacgactacagttcaacaaggtgaaggtggaggacgctggggagtatgtctgcgaggccgagaacatcctggggaaggacaccgctccggggccggctttacgtcaacagcggtaggtgggcccagacagagggaagggtcctagaggggtttggcagggcgggccagtggccccccagcccttggggcctgcatgtgatccatctcgcactcaactcccctccctcctgctgctgccatatcaagccctagatctcagccgattcagagaaatgcagtcgaagcataaatgtttagctttgttatctgggcctggaagagccgccagctctcattttaaataccctgaaaactaaatattttgaaatcaagaggtgggggtggggaaaggatatttttagaaggcaattataggaggctgggctgccaggagtggggctgcagggagaggcaggcctggggcatgtacaagctgactgcctattgcctgttgctttgctgggcacctgagcacaggcagccatctccactgggccatgggtgggcagcttggatgcctggggcccctggtggcagcctctgttcagggagggcaaactcctccccgacaggccatcctcactccttgaagtcttgcaaggtcaggacctcacggcacctcttaccttctcgtctctacagtggcagacccagcctcagggtagaggctgccttcctgctgcactgccctctcaggccctggttctttcccttgactgggagattgcctctccgccaaaactacctgtcctcaggcagtgccctctccactctagcttgagtaccttaaatcccacagatcactctcctccccccaacacacacagactgagtgtgcatgtggctacctatttattggggttcacttccagtcctgctcatcacagaatataatcctgtatctgtcattacctgcctctatttccaccagacagcctcccaatatgccctaaacctagcatggtctaaaagactacttggaacactctctgccctatgaccctcagacaaaaacctagttcagaccctgtcttcctgtcctggtgagggacaccccgtcctcccagccccttgtgctccttggtctcccttgccactgtgtctaataagtctgagtctccatgtccttgccagtcttctttctggatctttctcacacctgcctcttctgctctaactatacctcaagggtaaccctggcttgggtttcatccctagtcacctgaaccagagcagcagcctcctaaggtgcttttatcctgtcatgttccccaccccatagaactacagaacagggactttgttctcaacaccctggcctaaatgatctttccagcctaacttccatcagtcccttgtccattccattcttactcttgctcctgtgccatcctgactcataggatgggtcaagacagtttctctcactatgtgttggcctcattctttcctactgtaaaatgggcctctcccatgttcggagagtggggtgggaagaggaggccatggcttcatctcttcctccttgaccatcccaacccactgcagcgtctctcccagctagggctccactcctgggccactccttggccaaccatgctctgatggcatctcttgaattctagcctttgattagccttcaactctcatgctattgctgaactttctctgtgggcgtggccatcccagtgaatctgtgagcctcaggagaggggagaacagggaggatgctttctcctggaagttacaatcatagccagtatttattgagccaagctccacattatcccatgaacccatactcaaagccaggatatattttataaacaataagaagctcagggagattaaatatttcacctgaagtcaaacacctagttaatgatagagctgtacgatgtaaaagtagttggcaaacacttagtctttgagctctgtggggctatgtctagtctgtctaccaccctagcctcagggtctagcacagcacctggctcacagtgggtgcctggtaaatattatataagagaacttataacctgctccaaggtctttactgcctcctctatggcccagcctgggcatgacagcagggagggtgtctgagctcctacttctctcatcctatcccaagtttgggaaggtgggctgtgtctggggtctagcacctgccacctctgctgtagtggtcagacattctcagatccactttggatttggggccttcctattttattagtcaagactttcttgactagaattaacttaagcctatcttaagggatttatttattggcttataaaactggtaagttcagaggtggaactggccccaggcatgacagaatctaagaactcagaggaagagtccaagaactcataggatggctcaagacagtttctctcactatgtgttggcctcattctttcctactgtaaaatgggcctctctcatgtttggggagtggggtgggaagaggaggccatggtctcagacaggtccagatctaccccatcccagcccaccacccggagaaaagagatggctttgtctctgtgtccataagtacagtcacaaggatggattctgaatgaccctgccaggtcatgtgacccacttgaccagtcactgtgcttggagggtggggccatctttgcctggcctgtctgtgtgtgcacaggggctactgagaggcagggcactgtgagtgaaggcctggtcagaactccatggaaaagcacttccccgaaggggtgctgttagcagagaaagtgggagcggctgctgtgcagaaaaccacaggagtgccctctctcttgcacagggcttggggcctgtggccagaggtggtgagacccctcagataagctgcagtcccctcccacacacggattactgtcagccctccgtaggccatgctgtgatcagtttaggaaccagaccgtggcacctttgggcagggcactgagggcatatctggaatcccagcttcctgcagccttcttgcctcttgaccctccagggcagcggcagggcagagcaggggaaagagtttggagatttggtctcgtccaagctttacatcatgcaaccctgagtaagtcacttcaccccaccagtctttggttttcccgttgtggggctgaactagatgatctttaagcccccttccctctaaaattcggggattctgagtttgatgctgaggctgacatcctgtgcacctaaccagtacgcacacacacaaacacataccacaccacttctgctaccatgtgcagtccatggcaggcaagagcctacccttgaacaggtgaacagggccactgctggggaccaggaggcccctgctggggatgttttcccaggcagagatgcccaggctccttgtttatccacagaacccatgagacctgcagcaaccacaccctgtggtctgccccctctgactcatcccaaggtgggttggtttggcccgcccaggccgaagggaaaccagggctacagggatagggcagctagaagagggtacagggaggtcattggggagcagcaggctgctcgggtggcatcactttggctcttgagtggctactgctctgttcaggtggagcccagggctccttccacaaattagagtaggccttccttatagtcagagctctgccagctcacaagaggctcctgccttcctgaactggcgggcaggaggagtcggcaggaagtttgcggtgctaacacaatagcttggtccaacccacttctgagttagagaaacagatgtctcatcccaggtgaaagggagtttgggaatgtcctgaggtggctgtaccagcccctgatgtcaggctttgccccagaggacaggcaggtttgacctggggtgtcataggaccatggaagccctggagaggcctctgggccagtctcttacctggagtcttgcaaaagctggctgtttaaacacacacacacacacacacacacacacacacacacacagatgcacattcatgtcagtcacgcattcagaagcgcttattcaacaagatcttgctctgagctctgggaagtcgcagtcttggcccccaagaaagtccctcaaatggcaggaaactaaaacccgaactctaaaaggtctgccttttctaacaaactgagaggaaggtaggcaatttatcaaagggaaaggggcctcgatggataaaggagcactcgacctgagtcttgaaggacaagcagaagttttctccatgagcaaaggtgaaaagcagctgcacttgtgggcagtcggggacgcagctccacagcagcggctcccaccccgccactgtcactcttcaggggccctgataaactcacaccaagacactaacggttcatcaaaacttcctgggcttactcctcccgggtgcttttttaaattaatttttgagatataatttatataccataaaattcacccttttaaagtatacaattcagtggtttttagtatattcacaaggttatataactatcaccactaattttaggacatttttgtcaccccaaaaagaaaccccatgccctttagcagccactcccatttctccccctctccagccccggcaaccactaattctggacatttcatacaaatagaatcatacaatatgtggccttttgtgactgtcttcttatacttaacataatgttttcaaggttcatccgtgttgtagcatggatcagtactccattcctttttatggctaaatactatttcactgtatagacataccacattttatttatccactcataagtttggattcttgggtcatttggattcttgggtcatttggattgtttccacattttggctgttattaataatgctgctgtggacatctgggcacaagtttttgtgtgagcataggttttcaatctcttggggatacacctaggagtggaatttctggagcacatcatgaccatatttaatttttaaaggaactcccagactgctttccaaagcagctacactattttacattcccaccagcaatgcatacggcttccaatttctccacatcctcaccaccacatgttattatccttctttttgattctggccatcctagtgaaagtggtatctcagagtgtgtgcgtatgtgtatgttttatagagatggggtcttgctacattgcccaggctggtcttgaactcctggtctcaagtgatcttcctgaccttggtctcccaaaagtgctaggattacgggggtgagccagccattggcttggtctcattgtggctttgattttcattcccctaatgacctttttggaatgtttgcatttaaaggagacagtcctttaatctaccaaaaagatgatattatcagccaaggataccagactagtccctgggatggtagcacagggcacttttttcccccaaagaataagatatttattttctcattcattcattcagtaaatatttgttaagcacctgttatgtgccaggcaccatgctggacattggggttcagggtaaacatgtcagacatggctcctgccctaatggagcttacattctagtgaagaaactaagcattaaacagcaaacagttggctgggcacggtggcacaagcctgtaatcctagcattttgtgaggctgaggcaggcagatcatgaggtcaggagatcgagaccatcctggccaacatggtgaaaccccatctctactaaaaaatacaaaaattagctgggcatggtggcacatgcctgtaatcccagctacttgggaggctgaggcaggagaattgcttgaacccgggaggcagaggttgcagtgagctgagatcttaccattgcactccagccttgggggcaaaaccaggacgcaaaagaacctgccttgttcccttttggggggggaaaaaaaaaaaaggatatacaggccagagacaccacaggttttgcccacaaccttaagtcaatgtaattatgctagaatagctataagtagaagatgtgaagttaagcgagggattagggaggagcttgaccagcttaagaagtcaggtgagccctccctgagacacttgttgtattttgaacatcctgggcaggagactacttggcttattaaaggagcagaactatgaccagcatagtctgaaatatactgaaggagaaagatgggagatgaagtgggagaggtggtgaagcccagataagacctgggaagaagttgggggctttattctgagtgcaaatggaagccactggagagctttggtaatagaaaagattgatacaatttacatattttaaagaccactgtggctgctgcaaagtaaaggagatgaaggcaagagtgaaggcagaaagaccagagaggaagctattgtggccatcaaagaaagagacaatggtggcctggactaggggaggaggtagcaagacatggatggagtctcttgaggaagtggaaatggcaacccttggtgacagatggctataggggaataaaggaggatgaaatcaaagatgccctctaggactttggtttgtgccatttggtcacggagataggaaagactggggaagaaggtgggtagggcagatggtgcagagcacagttttggacttgttgagtttggggtgctgtgagccatcctcgtggaggtgtaaagggagagtccacgtcaccttcacttctccaaacacgggcaaccatagtgagagatatggatacgctgacaggggtgtatagacacgttgcctcaggagcccacgcgtgctagaacagtgtaactgcgctacagcgtgagcgcagctcttccgtgtggaaatctccctggagtatggctttgccactggcagagttgggctgcagtatcttgggaaggccctgccattacagaggagtggcctttctgagatggaaacacccgtggtcactctttccccacaccctctgtgactggctccccaaatgtcttccctttttaccttcccggggtcccagcctcgtccccatgacaacatgatactggcagcgcaggctcaatgcattcggctggggaggccccatctttcctcaggagttgtccttagcctcccaaagcctcgatgagcacagacatatatgtgagaagcccaagtgtgcaactgtggccccggccaacccagcatcctccctgctgtccactgctcactcgactggggtgaaacaatgggcacagcagtgggcagtctgtgccacccgcaactgcagaggacaccaggctgggcctggcagatccaggctgagatttctctggcttagccaacacccacaggagggcccaggcctgcagtcctcactgcgcttgcattcgtctgcttttgtcaagcctgggtgctgatggggaggatgtacagccaggggctaggagccctgaggctctgttgcaacacacactgcactctggccagacacttcgctgccttctctctctccactctcctgtgtgatgtaaatgaagggcaggacaacctcgagggttctcccagcaaggggattttacaagtggcaggcgtggtacctcagctgcttctcttctctgtccctttcttagttccctgggtctcactgacccagaagtggggcaaagatcagcaggaggtctctagttccagccagcacgtgggttccagctgggtctggggttgagccgaggagggagacctcagcaggggtggggctccgggatgccagctcagcagcaggcatgatgtggaggggatggtgaagccggccctgcccgctggattttatcagcatgctcctcagacatatacagaagcagagctgtgtatacactcccagccccctgtgctccatccgtctccccacatgtctaaacactgagggtgccgactgcctgccctcctcctcctcctctcacttccacccctattactgaggggagtggagagacccagtacccctgaggagacagggccagctggggtagcttgggccacctcattcaggaggccactgctgggctgggtgggaacgagaggccctcagaggccctgggagctgaggggagcaggacctgcttctggctgtccagtccggattggatggggcattatctaaaactgatgtttggggcgagaatgttcacttgaagctagctttctggatgccattccctgatgaggagcagagcttcagtgatgttcatttctcaaatgagtccagtcaatcggacgtgcagtctgtgctagaagccttaaggcccagccttgctctcccccagttttgcaccccagctgcccccttccctttccctggccctgtctcctccccaacaacttgaaacccgtgatttatggctggggctgtccgagacctggaggctccctctaggggcaacagctgataaggtcagggaggagggggctgtctggggtggggagatatggagaagaccccagatgcttatggagatggggcatagtagcctttgaagcattcctggagctagcccagaccttggagaatgggggaagagagcagaagctagggttcctcctacccccaacatctctccagatcttagaaaatgaccgtgtcctaaaggtgccatcccctgaaggcccagctcccttccagccactccctggtccaccatgagagcccaagccatgcaggcgggtgtaggtgtctctttcctgcaccgcctcctgcgtttgttccccacatgagacatcagcatttcaaccacttgcaggggagcccccggaaagccaggcagggaaggggagaggtgggcccttattcagcagaggaagcagttcctgctgtcttctcaccctgctccccccacaaaagaatgaaaatcttcctggcctttggaagtttgcctagagcttgggtgcaaggttgcactgggtaaacgggcagagctcatggtggcctctcctttgccttatttgtgactagaagggaccaccagacctcccctccccagtcattcctgcagcctctggtcatcttccagttttgacgtggggcatgaaggagatgattcctggggcctagggatagtctcagtgcgtcactggcacatgtctctcataccctcagtgagcaccaccctgtcatcctggtcggggcacgcccggaagtgcaacgagacagccaagtcctattgcgtcaatggaggcgtctgctactacatcgagggcatcaaccagctctcctgcaagtaagtgaccagtaggggtgggcatgggagcaagaacagggtaggagatgctgggtcagaagtggagggctctaggaaaagagggttccaagccactgacaagaggtccccaaggggtgtagacaggaagctttgccctacttcctagccctttcctggaatataaggagatataagctctaaggggcacaggggcttgtgcagtccccatttcccaggcccctacccaccccatctcctgatgtctaccctttcaccaacaccctttagggagatggggatgctagtctatgccctaggcactgggcactgggtttctctttctctctctctctgcctccctcagtctctctttccccccctcttttcctccccatctctcagcaactctccaaactttgttcttaatgaacatttcccaggctgcatcttccccaatagcgaggagcctggcagggccaggcagagcacaggttccagagccctttgctcctgtagtcttgaggggagaagaggggtctgcccagaacccagtactgacctcaggatctggctgcccttctgccctacaggaccccattgtacaaagatgccatccctgggtgctgcctgtgtcccttcagcccctagcccccactccatgggatgaggggataccagcaaggacactactctaggtatggcccaatgggggaggtcagggtggaggagaggctcaggctggggcctctcagcctccccaggggccagagcctgctcaccagccaggcagggtggccccagcaggaactccaaggagctcagaaccacccactccccatagcaaacaaggcaggtgggagagaggctgtcagggagggctcgttcaggcccagccagatcttctgggcagctgggcctacagtgccccctggacagattctctggtgagtgtgtgaggaggggaggggagcttggtgagggcagcataggctccagacagatctaggagaggagtgggaggggggcctagttaataacttcagtgtttcaaagcagcccaagcctagagccctggcaagttgctaaagctgccccattcccatggcatctgggcaaaggccaccaaaacattgatggggattcagagagagatgtttgaccttcccccaggcaaggtcagactcaacacttctcagctcccctgcctctgatctcccgctctagatccacagcccccttcctgggcacacccttgcccgggaatgtgagcctggtctgagaaggccaggacttttcaagacccctccacctaacaacatggtaacgaggggctcttgccccggctggcctcctcagctggcttcctccctggccccaccctgcccctgctgccacctccttctccccctccctgaaccttagaggagagtcccagtagcaacaacaggccctctagggaagttctcaacccaaactcagcccctcatccttccccgcctcctgcctctaggaggctgccatgttagtatgacagaccctagggaacattctagctgtgaaacttgctcagagttctttggaacagatctactagaaattcatcagggtcctggaatacctcacagggatgacccagccctgcatccccatttccttgtctcctgcaccctcctcctccctgtgacatacacactaggtaggtctctcctcttccctagccccttggaccccagactttgaagggatccagcactgtcactgaagtcagccctcgtccgggcagggaaggttctggcccctcaggacaggtgccagggctgaggagggccatgggggccagggctccagtgctagagttcggtgtgggcaagggagtggtgagatatgtgggctccaggagggccctgccagcaaggttgcaccccctaggacctctgagtcctgcccagctaaatctgagaggagcagaggcaggagcctgagccattgtgaagatggtgccctgttccctttcccaccagggcacctgggctgcactgcttagaacttggtacccagagccaccacttccccatctcagcctcccctggttccagccaaggttcctggaaccaacttccccaacaccctttgtcagccctcgggggagagggcagccctggtggagatgcggtcagaacaccaggtcctcagagctgtgctggagaagggcaggggggtggggggcagggcagagcccagaggccattctgcgggtggacgagctgggagggaaggtgggcaggcctcttggggttcctgatgacacctgaatggaataaaaaggaaagaacttaggaaacggaactcacgtcttaccatttgtgctgtttgtttactttttattttgatttttttgcatttccgcttagcttggataatgaaactacactggtcagtttcattccagtttctataaaaatcagttttccttcctggttttcttacacttgttgttgtgtattggttcagagccctgcagggagtgttggaaagcaggcacactccgtccctcctgtttttctggaattcagtgccaaaagaaacagtgtcactgatactgaattttgttttaaaaaaagacaacgtagggggatttgaaaatgggagtccaaatcaaggtgactgtcccctgtctgggccagacaggggcctctgcactccctcttgctgctttctcctcttctctccgtgtgtttgtagagcacggttggtgcgtgactcttggggactggttcaggggatgatgacagaacaagactctttccagccctgtgcacataccagtggcatgcctccccttcccatcagctcatccccctcatccctctgcccctaccccacccatgtccaggtgattccccatcccacctccatctgcctgctcatcctcgccacatcttcacccctctcatgaactcagaggcccttcactccctccagtgcccggggcacaccgccatccttcatccaccccctcccccgggtgagggcagcacacatggcattatccccaggctaccaaaaggagaaactgaggcccgggaggtggggtgggaaaaggggaaggcagaggtcctgacctctctgtcaccccagatgcagcccgtgggctctcctctctgcccctctctcaccctgctcttctccagccctggggacagaccttccccagagtcataactgatgacctggtgggaaaggctgggaaggctgttacccgctgctccttctaatctgtcctctgtgccccctgaaaatcagagggtcaatcccagtttcagtggaaaccaccaaccaccacccagcccccaatgctgagttcagactcccaacctggttgataggctaatgtaccccatactctcttaccctggtattaggtgcaggttagagaggctataggcccagctcacccccaaagccttctctagggaagccccagtctcctgaatgtgactcatcctcagcaaacaggactaaggagagacataggagtgtccaggaggtccctgaaggagctagcaccccaaagaacagcagtagctgtcagccttccaccacccccactgtgcccctccccagtgccttttgttttgttcagccagcggggagcacattttctcaaggaaggaaggttaggaccataatgttgtgcaactcagcggccatgaaagatgtaagtctgtagtcaggatagtccaggctgggtgtgagataagggccacagggatgtatggagttatcattgttatcatagttctccaagggtcttgggacagcagccctgcttgtcagcaatggaaataaatttccccttgcccctcctgcccctgtactcccccattttctctctctctctgtcacacacacacacacacacacacacacacacacactcatacacacacacacacacacacacacacacacacacaggtttcccttcctccaagagctgggctgatctcagacattggacacagacacatctgtctctttcttgttcctttgtggaatccaagagtcatttggcaacttcctgggtcttcatcctccactcccaaaggcacttatgtttgaaaatcacttctccctctctagtccccatcacaagtggacatcagtttccaagagctaaggaagaagagcttgagctggttgggaagccttagccactacctccatttacctgagctgggatgaatagggacgagggccagggatcagagaaggatgtgttgacaagggggctgatggcagtctcctcctccaaaccaccctgttcagtaagacgaccatgtaccctcttcccacccatgccacttccctgatacacttcccagccctccaccaccccccaattagccaggcatacccacacacacactcctaccactacaggacaaacctcctgcctcccctgggggagatgccatcaaggcccagagaaactctagccctctgctcaactaccactcccattccccactcctccagatttgaggtcacagggtgttcatgagtatctgtcacaaccaatggctgccacttactgtaagcctaagtggcttcctgacagttgctatatactgcaatgctaagaaatagagtacacttgcctcttgaggaagtttacattgattaattttgaacagtagcctattattgagggggacactggtgatgaacttagctaatttcctaaggaagaagatgcagaggcaatatagacccatctctgagtagggagatgtggggaaggggtctagccctccctgtaagcttctccttaggtatccagccttgccggggttcagaagagagtacagggctgggcatgtcctccagaaatttgcaagacttctgcaagaaatctgagattcgcttgaggagagggctggcagccagagagcagaagaacgtgtaccctgtgggtagagacaaggtcagggagattgagtggggggtgctttagagctgtaagcaaggcaagatcagagaatgagatccagggcaggtccaggcagtgatggagaaacaggtcatggggaaatggaagagtttcgcaggctggctggccactaggaccttgatgtggaccaggcttccagggtcccccagcgagcctgctccaatcccttttgtggtccttgctacctgaggccagattccctgcacctggtatcaggaaggcccactttgggatgctgataattccagctcctctccaacttcccatttccctactaagcttttcccatgtacatcacactggggcagcctattccaaaccatgttctaccacaagggttcctcaaaaaacaacatccatggtgaagtaaatttgaaacacaaataaatttgagaacttacatggaaagttcagctatttcctcctatgaaactttcatagtctttcataggtgaaggtacactgcaactctacaaggcaccctgagaatgtatttcctacattgatttggccacagaaccctctttgaaagaacagataaaacatctcttaggtcacttttgtcaaagacatacacagtctgggaacagcattcccgagttatctgagtttcctgggggctgtttcttggatgagaaaacctgcccagggcccaggagagaatccttcagtcggtcctgggaggagtagctcccaagaacttggtattccttaaggctcccagatccctgccagctgactgactgcctggcaccaagaggccacagtgcttgcttcatggggcaccaggcaggtaagaaggaaagtctcaatgaccagtaggacaatttcccatcttccctcaccccacttacctaaatcatcctccccctgacccaccccaccttccccaccacccatggagccacatctatgagacagatttttaaggagatttcagagccctccacccagccctgactccagtcccttcagctacaagtatgaccccaagtgcctgacttggtttttctcattcatcactgtgcactttgatttctaaccttagcctcgcggatgatgccagtttgttctgtgatttttccccttttccttctccagatgtccaaatggattcttcggacagagatgtttggagaaactgcctttgcgattgtacatgccagatcctaagcaaagtatgtttgaagatacaaacacaagtccctgctccttagaaagcttctgggtgcagtccccccaatgtagggcatagggccaggggtgttggttgttttgatctttggctgttttgttttgtttctcttttcttttttgtattttggtttgttagttctttttgttttgttttgttttgctttgttttcatttttggcctaatccttgggtttaaagttcagggctgcaggtaaggggcagagtggcaaggccaatacaaatggtaacggtggcaaggaacccagctggcattggcaggagcccgtgccggggtgttgcaatgcctgtgtcttgctatcctggctctctctttctggttttctttcttttggtaggtgtcctgtgggatacaccggggacaggtgtcagcagttcgcaatggtcaacttctccagtatgtctctttcttctatttcttctcttccctggtgactgacagtctccccctggggagggatggggccttgcttagcaagactagggggagatgtagagggtgtcctgcgctccttagaggagacggaaacacccccggcacccccacctccacatgtgggctgtacctcctgggcacagtaatgccaagttctctctgcagcagccagggccacacccaggcctcctcccaacttctggggtcgggcagcctggccagaatgggaggaagcatttgcagagccctcccctgctccgaaggctgctgagggtaccaaagggtctggcagtgagtgtgtgtgtgtgtgtgtgtgtgccgacgtgtttgagagagaaaaaaagttctcagaaagcccattttccagtctggccagagtttgtttgttttgagggtttggaaatggggtagagggaaggaaggggaattaagggagagcaggacccagggcaatgatttccatgaataccagagatatttatgtggctacaggatggtgggagagggggcgggggttggtgctggagatgctaaaaagttgaggaaatgaggaatgaggggtaactggtgactctctcagcacctctgtggtctgaatcctcccatctaggattttattcccttcctttcttcaacttatgaggttggagctttccctttgcacagttgcaaaaaaaaaaaaaaaagaagaagaagaaggagaagaaagaaagaaaagtgagccccgaggcccaaggacccagccataattatggagtgcttttatttggggcctgagagcagttccttccagcaccaccaggtggaggtggagcagaacaaaaagcctctggccggccattgattctgcttgaggaccaggggctccgctggcttgcaaggcctgtccccagttacccatcccatcctgcagagcaggctaggcccctgcgtgccccccgacctcctcttctccagggaggacagctgggccccatgaggagtgtggaaccaagtgtccacatggcactggatactgggaggtagaactctgggaggtgctaaaggtgggatccaggggaccatgtaggtagccttggagaaaaggggtttggggatttaggtctcagggtggagaaatgatccttcccagtactcctcagaccacagcacaaaagtccagcaagttactccccaccccaaccccacaggggcatagagacccctgggggatgggagctgcttggcccagatggtcaactatcttaatagagtgtgggaggccaaggaggaagggcagagcctgtgggcaggacatgtggcccaacagaattctctagaacgcaggctctgcaatcatttcagagtcatatccagccctgagtgcaggactgtagagcaggagggacctcaagagaaggcagagcctaggcagagctgggggccaggggcaagagacagtggggcaatattcctctcggcagagagcctcccgggcttgtgagactgtcctggatggcgagtcccagcctgtcctgaatcagagcagcagagcctccggaaccgggccgctatccaaggcctctctgccagctgggctgcttcagctttcagcctagatctgctaggaaggtcagcagggccccgggagcccagaaaagagcctgcaaaggcagtccaggcccttctgcctagtgtcttcagtagcttgactgttaccttttcgtaaaggatttatgctcttcaagcactttcccagagagcacttcatgtactgctctagcagataattactgaaaaggtagtgtaaagtgctggcttaagtgttcaggcttcggattcaaagagacctcagtaaaaatgccagctgctgagcttactagctctggggcctctttaacttctcaatttgttttctcatctgtaaaatggggatgatgacatttatgcctgtggggttactgtgaggatgaaatgaagtgctgcataagaagggcttagcagagagcctgccattgtgattggagcacaatttagtacctctcccagctacaactggtatgcgggggcagggcagcatcagccccctagaggctgactcccagcacatcctgagcaaagtgtccaacctgcccagatagcatctagaccaggttatcttttgcagagatcaaagaaagagcctgtgactgcaatagcacattgaagcttttctttcttccacaaacagcccctccattccccacgggtcaaagcttgtccatctttatgtccccatgtaaaagagcacacatacttgtacacacaagcacaaacgcatgagcatgggctcatacatgcacaaacacacaatcatgttcttacatacctgcacacatgagcaaacccatgagcatgtgctcacacctgcacacacaagtgcaaacacaggagctcatgctcacatctgtacacatcactgcctccttgtccaggcagcctatgactgtatggcatgggacatgtccaggatgaagaatttgcatattgtctggtaagcacagccctgttgggagtccagcatcaggttgccatggttactggtcaacatgcaaatttctggttaataggaccttccggtgactcagtggtgccactccaccctggctgagtggcagccaatgaacataatgagtgggaaggtcttgtctttgctggggcggacacagccataggcccctcatgttccaacccatgcttcccagtgagaaagctgcctacccagtgactggccaggccctcagtgaccccaccaatcatgccagccaccactctaaacagtactggcctttgactcaaagaggaggccagttaggagccctagaagctgcagctgctactattcggttcccagaggagtgatgcagaagaaaacgcttaaagggctttgggagccctgctcacttctccagctggtcattgtcctcaggaatacccagccaggcctgcccagaaactcagtgggcaggaaagccatggcttagcaccaagggaccaaagggtctggcctccagtctcccttctgcctcctaatttgctgtgtgaccttgggaaagtgtcctagcatcactgggccccagctgcctcatctaatacaaccacctcgtcggaaagtggggcccagaccagctctatgaacccaatcctctttgcgtcccaggtgttgtggtcaagctgggctgttctctcagggcagcatggctggatagccaaacaatgtgagctctccagctgcctgaagggtccctgggccacagcattaactactcagtgagaggtgcgccaggttctttgagaattgtcaagtttgtactgtctactcagcacgcctgaccagccctgggacaccctggagaggagtggacaaactgtacttacggcaactttttcctgcctccaagcagtcagagtgggaatgcaaagaaaccaaaacgtcaaggtcactccccaacctgggatttaatagcagtacaagaatggcttgtgtctggaaaagctgggagtaatgaatgcttcattggtgtggtctctgcatggaactggggggttgaagccccaggatcttcctcaagcctctttagtcagagccatcacagtccctggctcggagccatgctgctctcccgcccttttccaaatgcagaaccttctggaatccctatcaggaagtagatgagaggtccagggatggataatgcgcaggacttcctgcggattgccacgtgctcgccttcctccaaggcagatgagaatatcagacacagtgtcacaccttccctggatctagtggtgctgactatacacctggggaagccagagagtgagccaatccaggctaggaggagcggggccctgcacgcatgctgagctcatgccgtccaggcttgttcacatcttcctgtagctgtgtgcaagcactttggacagacaaggaaacagggattatggcttacccacatccacatagtgaattagggatgaaacggagactctaggcttgtagaccgatgctggctgctacattagaatggtaggtgagctttttaaaaacactgttgagatttctgggctcccacctcagagccagatttcctcagtctggacaattcagaagctcagccaggtttgcaaacctcctaggatcctatgccccaggctgatccccacgtaacagagaagagcctgagacttaactagatnggaatcactcagggtggcacagcagcaggtcagtgcagaactgactcttgagtcagggtccttttatctaacccttcaatgatgtgggggtctccgtcacagggtcctgaaatcacacattcaaacaggatcccacttccaagactgtaatttgtccaccagttgaggagctcagacattctacaagtgaacccacttgtctcttcctgtgagttgcagtttgctcttctgggtagtgaaatcaggctcaggcaccatggcccagccctgtaggcttctagggtgttgcggtgtcaagtagagaagtgacctgctatctggagcctcatcctcttcctcttcccactccctcccacagactctgaggctccccacccgggctcccagtacgtggacaggccagctaggcctgtggggcacagcagggacatggggccagtctggggacctcatgcctgcactctgaacaaaaaaaaaaaaattgggcccccaatgagggagctgggcaagctgtctgcaggaaggcttgagagttgagagtgctgaaggcctggcactgatgctgggaggagcaggggggctcctgagacccccacccccacttacctttcctcccagggacatttgccaactgactcttgcgcctctgcctcgccaccaggtactaaccccacagctcatctctaaagagcctgccctgcctgctgtttctaacatctctctctaccctccttggggctcttggggactgggtgtcagggaaggagctcaggaggctgggaggggacactactaacctgctttcacctcgcaggatggctgcccggtgtctgaggagtcctgaccaacgtttctgtctctctctctccccctgtccccacccacctgtctctctccctccacccctccctttgtgaccctcgctcttctgcactgccagagcaccttggatttgaattaaagggtatgaaacctctgtgtgtcactcagcaccatctgcgtggcccctctccacagcctccgatgccatgtgtgctgaatgtttggtttcctttccaaaaaatggaaaagggatgattccaaaaatctctcctggccccatcgagatgtcctatcataaactacgttgatttagcaggagacgaaagaagctcatgaacagaagggcactcaggggttcggaccgttgccctcagtgtaccgtagcatccctcacataggggagatttattgctaggagagctcagaggggagggccccctcctgagctgagtgcagacccgcaggctggctggacaagagataggccccatgtgtgaacatggccccttgaagggctggtgtccaggaaccacagaagcctggtttggagagttgtgcagagaggcatccctttccatttgactttagtcttctttccattccccatttccatgttcattgcttttcatcctgcaccaggccagcagctgataactctctatttatctctgtccctgccctgtgtctgtctgcctggctttgccatctgcttgaggctgtcactccctccatgatctgaccccacattggcaagaccagccagggtctgggtggggctggcctctagtacctgccccttgtctcccagctcagaatcttacatatgtcctcctgccacctgctactaccaccctctggcccccggaagactccttgggctagaagggactttatggggttagtgtttctggctctctggctttgcaccgggaggctcctccatagctcaagtgtccaggcatatgacatgaggagagaggcaggggctcagagggtgggggctccagtggggtgggatctcagacatggtgcagagcctacagttacagaaaggctgctctcgtggctgatttggggaggcctcctagccccaccacctatcctctatcagctgttctcagtagaagatagattgcaaagtttgtgtgtaagagtgcatctgtctatagctactggctgtgatggggttgtgggagaggcattgagtccgtgtggggtctgtgatggtggcagggtgcacaggcgtgaatctgcaggtacgtgtgtgttgttgagagtatacaccttgtgaggtctgtcagggcaagatgtcagcaggtggaggggctgtgaatgcctttgtgttaaggtttgagcactgtgcaggtggaactgtgagggcgtggagatgagtgtgagtgtgcagatatgtcaatgtctataaggctggtctgtatattcactcactcaccaatgcaacaaacatctatggaacagaatttaccagacacacagtccctgccctcctgggctcacattcacaggtgacaacaagcaaacaggaaagacatcaggtggtgttcagtgctgcacagaaaataaaatgaggtaatgggatagtgcctggctggagtggggtgctagtgtagcgaagtggtcagggaagatttatctgaggaggtgacatctgttttaagacctgatgaaaagtggccaaccctgcaaacaaccaggggggagtcctgcagagggcggcacagcaggtatagagatcatgtggttggagtgggcttgccttattcagtggatggagagacttccagcatctctgaagcacagtgaacgcagggagaggaccacagatgagatccaaaaggaaggctgggaccaagcagccgggggcctcagaggccatggtaaggctttgggttgcatttgagtcacagtgtgaagccattttgagtttctaaacaggggagtaaaatgatctgctttatggttgtaaataaatgtagctttggatggacaacagcctgggctgggggcagggtggggaggagtggaagcagaaagacccgtcagaaggtgaccatctccagatgagaggtgacaccatcctggactaagttggaagcaatggaaatggtaaggctagatcagacccaggatctacttgggaagcagagctgcgaggacttgcggctggatccggcattagggtaggtgggaagaaagggagtaatcaagaatgagcccaaggtatggggcctgagcaacaggaaaagtggtgctgcatccatgagctgggaagagtcgagtaggagtttgaaaagagggtaaggaagcagggattctctttggtcgtggcccttggatgcatgagtctggtgcccaacacagcccaagtaggatgcaactgattaaatgcctgcagagaaaaggacatgaatagcaagcagaaagggatcacagatgactgcaataggaaaaatgctcaacctcactcatgagtaaaatggaaataaaaacgacactgagacaagcacagttcaccccctggactggtaaactcaacaagtctgataacaccatggagtgaggggaaccagtcctctcatccatgtctgatgggacagaggctgccaataggtgcagactcgatggagggccatctggcacgatcatacttcagggagcagtcagggcaggacataaaaatttgagagtctgcaaatagacggtatacaaagtctgagtctgagttaaatcactaagggagagagggcaggtgcaggaaagaaagaaacctgagcccaggcccgtctatcttcccagtcggtagaaaagaagaaagcatggctaagacagagacaggtcagccaatgaagtaggacagagagaagaaccattccaaagcccagggggagtgggccccagaaggaggagagcagctgggaaggaagcaagtgacctcaggacttggcggcctggaggttgttggtgcctgtaaccagggtagtctcagaggagtgatggagacacatgcctggctgaactggatgaggcatgtgaagggggcgtgagagctggagccagggctgtgggcacagagccaagagatggggacctagggtggaggtctggttgtttacaactccatccaactgtgtgtcagtgggcatgggcgtgtgtgtgcacctgttgctggagtgtgtggttaactctgtgtgtgtgcatatgttgtgtgtgcaggtgtgtgtgcgtgaatgaaggggtctgcctgtgaatcagataggcatagttagaaatctctgtgtgtctggagggtttgtagcccctgggtgtttcctggtgtgtacacctttgccacaggatatgctgcaagcccaagaggttagggacatttcccagggctctgccaaggcattgaggtccagcctccactttaccctgagctgggaggaggggccagccagcaggtgtggtgggcacgggtggggtctccgggctgtagccttgactacagctagcgctgtcaccttttactttttcttcctcctggctttctctgttttagaaggatgggggttgccccagcagcagcagcagagggtaaagaggacagtcggcctttgggagggctttgaggcccagcctagctcagctcctcagcaacggtgggggctgttccttgcacaccagcactttcctagatgccaggggtccatggtgccactggcgggcttctcacaagcagagatagcaggcctggagggggccagggccactccctgaccaggctgcaggggtaaacaaaggcattcccatgatcactgccaggaagaacaactcctcttggcccaccaaggttctttgcagctaccaggccactgtggagcagggcagggtcaccggccagactgagctgtcctcccctgctctacagcctcgggagctttgcctccactccatcccttcccattcccctgcattttccactcatgtgctctgggcaggcatggggcttggggaggggaactcaggaggagttgtgtgtgaccagatccatgggtgggtgggagctgcagggaagtggaaggcaaaacagagcatgtaggagggaaggaactggctggagaaaagggatggaaaggagctgggcaggacctgagctggggagagcctatggctttgggggcaaaggggtctctgcaccactatccctatggggtttgcctcctgccccacccctcacatctaccctacctctgcagaagccgaggagctgtaccagaagagggtcctgaccatcacgggcatctgcgtggctctgctggtcgtgggcatcgtctgtgtggtggcctactgcaagaccaagtgagtgtcagtcactcaagctggggacaggccaagccaagggatgggcctccaagaatgtgtgtgaagaagactttcctcccccaccccactggagccctctataccctcctaggccccaactacccctcgggggcctctgtagctgggtgggtgtcgagccaaagatctggaccaagaagtagaggcagagggtcagggagacaggccccagggcactgacgaagaatggttgtgagcacaggctttggaagaagacgaatctgggttcaaatccagctctgctatttcccatgtaaccttgagcaaattgatggttcctcatgggaatgatcctggtatgtacctcaaaggacactgtgaggacctgagcagtagcgtgcagctgaccccacaggctcctggagcaggtgccccgtcaagtgggcaggtactaggtagtgttggggaggaacacagagaggacagcttcattcccaaagaaagacagatgcctcaaagcactgcctgaccccgccttgggagcaattgagacaaaaggacagagaaggcagggctggtccccctctggacagagaagaggtaggggcagaaccttggggcaaggagaataagtgaacagagagggagccgggcagtctaagctaaaagacagcacagatgagggtcaactgtactcccggagcatgggcagcccagactagctggagcaaagggccaggtacaggaaaaaagcgggcatgagtctaaaagaatagctgggacccagatgnnnnnnnnnnnnnnnnnnnnnnnnnnnnnnnnnnnnnnnnnnnnnnnnnnnnnnnnnnnnnnnnnnnnnnnnnnnnnnnnnnnnnnnnnnnnnnnnnnnntgaaggctatagatgtgcctttgttggataaacccaggctccctagctcggcatccaaggccctatgaccttctgatgtgctgaaagatgacgggtttgtaacaactgttcttatctggaaagcaagggtctggactggacagagccaccattctggggactgagcgcctggtctggactcatgctgccccatctgtggcatctgaagtcctgctggccttgtcttgaatgaatccaggaccagaaagtctggaggagagtcaggagggagttggggcccagtgagcccagaggagactgggcccaagagggaaaactaagtccaagaattggagaaaaagcaagccgccctgtcctgcccccactgcatttactcatttcttcaacaaacattcagtgcctgctggacaccaggtcctgcctcaggcatacggccggtgctctgaacaagtggtccagtgtcacgggacaccttttagagtcacctaaccttggctgaggagcaggaagggtttccctgaggaagcagcatttaggccagggcctgagaggtgaacaagagttagcaggtgaagaggagagaaagtattccaggtgaatggcctggcatgcgcaaaggccgggaggccagagagggctgggcatagtgggggatcagaaacaagctcaccatggaggcagctagctggggtgctgggtgggcagagagagacagggctgggagagaaacaggacactaaggcccaataaaggggttttattttcatttttgcgggtacttagtaggtgtatatatttatggggtacatgagatattttgatacagacatgcaatgcataataatcatatcatgtattctattcatccccccaggcatttatcctttgtgaccttgagcaaactgatgggtcctcgtggacctttgtgttacaagcaatccagttatactcttttaaatgtataattaaattattattgactatagtcaccccatatgctattgaatactaggtctttttccttctaactagtttttgtacccatgaaccatccccacctccctcccaaccccccacttcctttcccagcctctggtaaccatccttctactctctatctccgtgagttcacaatgaagggtcttaaacaggggagggacatgattagatttaatatcaaataaatcgagcatttaatatgtgccaatctgaagtagtcccacaggccctgactccctagccacagcacctgttttattttcttcatggaactttattgaaagtatctagttcattgctttgtttatgtgtttaccatctgcttcctctactggcctgcaggcttcaggagggtggattccctatctacctatctattgtctctgctccaaaacagtgtctggcacatagtgataactcaatacataccaaattaatgaatgagggagagagagagggagtcagcactgtgcttgaatgtttcatatacttttaatcctcaatagtctttggaatggataaatgatcaccctgtcttatagatgaggaaagtgaaacgtgaagagcttaagtaacttgcccggggttgcatagctagaaagcagtgaagttctactctctgggcagagccagagctcactgccacgacgctcaggtcctattggattcaggtggtagtgatgctgtagggcagcttgagtacagggacgagcagtagccatggccaccctgggcaggaggaaaagctgtttccctagagagatagctagggaagttcatcgttggcgagtggggggaatgccagcctcaccttcccttcccttgtgcagaaaacagcggaagcagatgcacaaccacctccggcagaacatgtgcccggcccatcagaaccggagcttggccaatgggcccagccacccccggctggacccagaggagatccagatggcagatgtgagtggctttcctggggcccccttctgagccctcagtggacagccagccttctcatgccccctgcaaggatgggccagggcagcagccagcctatcccatggccagccttgcctgctaggcactgcctcaccaggatggctggccttggtttgctcacttccatgaggaaggggtgggggttgatttgctggagccatcgctgccccaacatcaagtcactctcacacagtgggtctccccaaccaggagctcagtcagtgctcatcacttccctgtccccaacaagaaagagttcatttgggccccagtcactaactctcgcccaactctgtctgttccagtatatttccaagaacgtgccagccacagaccatgtcatcaggagagaaactgagaccaccttctctgggagccactcctgttctccttctcaccactgctccacagccacacccacctccagccacaggtaggcaccaccaaggcccatggaaacttgtagactcacatacttcatctggcgcaaagtgcccacttactccgacatccagagctattcaataccctcccctgagcttgccacaggaatcacagcacaccttagcctcctctccagaactgcagaggccagtccacacagcacaaaggctcagacaactcaaaaataacatggctggctcccttcttccctcgggagcaccaggaaatagtcagggccctcacatactggcccctggggctgggcttctgagataggtagctaaggaccacggtggtggaaaggtccccagacagggggtctaaggtaaggctggggggaggctggttgcaggaaggaaagaaatgggtctctgcacattacagctcacccatctatgggaccccagccctccttcttccaatattggggttgggcatttgcaacaatacacatcaccccagagtggagaagggcattgagctaagggagctcgaggtggaagaagagccagggaggtccatgggaccacacctgctgggccgccctgccccttcctgacccctcgtctcaccccatctggccttcccagacacgagagccacacgtggagcctggaacgttctgagagcctgacttctgactcccagtcggggatcatgctatcatcagtgggtaccagcaaatgcaacagcccagcatgtgtggaggcccgggcaaggcgggcagcagcctacaacctggaggagcggcgcagggccaccgcgccaccctatcacgattccgtggactcccttcgcgactccccacacagcgagaggtcagttcctaccccctgacctattccccgcttagccagagggctggcaccactggcccaaggctgacccttagggcccctcagaaacactccaaagagcctcatctccatttttcatatgggaaaacaaggtcctagaaaaggtgaaatggcctgctcagagccatcggcatgttaatgacagactgggactagagttgggccagtggaccctggtggacagtgaccatctaatttaattgtcctcccaggacacttttcacactagaaaaaggacattattaatagttacactggaacatcaagaacaaacaggcagccgggcgcggtggctcacacctgtaatcccagcacttgggaggccaaggcggatggatcacctgaggtcaggagtttgagactagtctggccaacatggtgaaacccccatctttactaaaaatacaaaaattagccaggcatggtggcacatgcctgtaatcacagctacttgggaggctgaggcaagagcatcccttcacctgggaggcggaggttgcagtgagctgagatggcgccactgcactccaacctcagcaacagagcaagactccctttacaaaaagaaaaaaaaaaaaagaacaaacaggggctgttctggacaaaccaggatacatgctagaagttccatgtcccagcaggaacagaaggagacacgaagaaggagtaaactgcagagtgggaggggaggttgcctttgaggacactgaccagcacaagatggacgtgagccaagaatgatggcaggccttggcagtagcagcaacaagaccccagggttcaaggccttgttggcttcctaagcagtggatgtagtaagaaccaggaaacgccctttcttccctgactccaagccagaagtcaagggccagcacccctgccaccttgctcagccctgagtggccctcagcaagtggggtctgtaggaggtgagcagggaaagatgagtggtactaaaaactccacaccagggagcagggagaggagcagatattcccttgctctcaactcagcctactccatgccaggccctgtgctgggcaggcctggctgggaatccagaagtggcctgccaggttcctgctcctgaggagctcctagccacagaaacaaaccaaggaagcttacagcagcctatggaaggtgctaaacatgacaccacaccagggcagagagacccagtctgactgtaggctctgggaagtagccagattttctaagcccagctccaccacctgtgtgatttggggcagactgatcacctctgtaccttgttccctcagctgtagaacagggagaacaaaagctactatgcatggttcaagtgaaggccacctgagatcatgtgcacagagctctttgtctcatccctggcatggagctgatgctcactaggtgtagctatttatgaatcgtaaccacagcaaatgagactccttaatgggtggtaggaaggggagaggcatggagagcaggaagaaaagcattctaggcacggggaacacttgagctgttccaacagaggcacttaagaacagggctgatgagtgaggtgcctggaacagagtgggctgtagggagcagaggagctgggcctgaacaggcaagctgaggccagacagactgaccctgggtgggtaaacaggaagaccggcttcagcagagctgtgactttacaagattgctctgggaactgcatagagtgaaggaggagagaccctggggtggacccagatgaccacatgtgaacagtcgggcccaggatggggtggagagtgtgcttccggagaagggaatgggtaggacttggtggttaatcagatgtgccggtgggaaagggaagagggaggagtcaggcgattcagaaaaaatgataatggggactccaggctggttccagagagcagtgagatgcccagctgtgcagtttggaagggaagcgtggaggtgggtggcccctgtcctgaggtgacaacggtggggcagaagactgatgggcttacaagggggatgtggagcacaaaaggggacaggtacccgggatccagcctgggagatattagcaaggccagacttctgaaggagctggtggtgtggggatgggtctgtagccacaagcagagacacctcatgggatcttggtactcccctgaagcaggttttgacttcactgtaaggaggaatatttccctcactgaagccatcagggcatgggaggaattgtccctgtggggcagtgaggccaggtcacaggggtatctgaatggagactaatggcttctggaanttgggcagtatgagtcctggttcctgactagcctcaagtcacatcccagctctgccacttcttggctgtgtaaatggtaccgag

SEQ ID NO: 8 - DNA, 302603 bp, Homo sapien
gaattcaattcctttttgtgctggtatcattgcccaaagcattatcttaaaggtgaaggcacagcagtagtctctgatctatgagaatattggtcatcagttagggaaaagtgacttgataggagtggaaaatgagggaggggaagaaactcccagctgctgaggagccagtgacaagggtttagctctatctaggcaagttttggggacgagaattatagtgtcacacaggaaccagacaagaagcctaatcacagcctagagatgcttctggatttgaaggaaagtctatggctaacttaaatttctcttctatcttacataacttaccatagccctaaagaacttgctggcagttcattttactaaatcctgaagtaagttaccaagcatctccccaaccccaaggactttataaatagaatagatcacccatttgctttaagtgttacggaagcactccttgaagcttttttcttcattctgtcttacaacttctagagtaattcaaaattaaagagaaaaaagctatagccttcaacagagtttgaaagcagcaggcacagccttctctgtccatttttagcagaactccaagaattctttttttctattatgatatgcagcagaaatagaaacaaccatttaggagatgtgactcaaaattcagtgccaaatttaaattataaatacattgttctttctgatagcattcttgattattttaacaagttcagtctttaactacaagataacagagtggatgctaacgacgcagatttgtgtgtgtgcttgtatgtatatatatgtatgtaaataaatgcatataccaaatgttgcacctttaattttataataaactacattatcgtatcttactaaggtctcattaagtcatattttaagagcagatataattcataaaattttatattcttcactttcaatataactctagataaaagtcacattttatcttacaagaagtatctttttggtcatagtcttcaaacagaaaacaagaattaaaatggccaaattgttaattttgtcctttatacttaaaagttatccttatttccattttttctttcaatgcaaaagaatttcaattttatattgagtatattcccattaatgctgatgtaataagttatttttatgttttgcaatcatttaagctctgctatttttctaagatagttctcaagcatctgcagtcatcatttatatcatttatatgtcacctctaaaggaagccacaatttgtaagtgtgagtaataaatttaagattgtgatagttgcataccagttcctaaaggtaaacttctgtaggtatttatatgtcagagaagctaaaaatctgtgtgaaatcaggggagatccctccagtaatggaaatcactctttgcagcaggaacagccagaatgactaggaagatctgccttaagactacctatagaccgaggcaaactttgtcagatatccccgttaaatttctatgccaagaaatttcactcagtatgaaatcttcacctgtccatttttctctttatgctaaagagttcaagcatgtctaactctgtgctgatatgcccaggaatatcatttctccttctttatccaagagagaaaaagaaatcatgcaggctctctggactttgtaatccctggcaaataccatctgagatgaaacccacagcagcataatgttggtttgttgtttcagatgtatttgatagggtgcaagatctttgctgtggtcagtcagattgccacttctatccaactctaaaatcctattagtaaaagggcagctatgcctgtctgtatgtctccctcagagatttctaagggagacgtagccccttccagaatgcatataaagataatataattaactataaactccttgtatgaaataaatatgcatttaatctggacttcaaagtagaaggtttggctctcttgttcttagtgtttttaaaacattttgcactcaaaaaaatatggcaaacaaataagcagaccatgtgaatttttaaagtgctttccaaggcatgttgtattttaagtacagtgtcagtcctaactctaaccaacctagagctacatgctgagaattgatgttcatgtggtactataagattttgaagagctttcttgaatcactgaagattaaattatgttccatctgactttcaggttaactataatttatgatgtttaagagttagcgtgttataagtaataactctcaattaaccaaaatagccagttaacttgaaaattccactcttagccatttttataaacaaaatcttttggtaatacattctagactaagcagaattgttttgtgtacaatctatgaaaaatgtttgctaaataaatgaatagtataaacttggtaagagaggttatttttaaaaccaaagttgttagtgcattcattatttgaatacatattgaatctgttccataaaccaagaactatttgtaaagcaggaaggcacagctacttaaatttttttaaattgacagttactttaaattgttgcatttatttgaaaacataagtagattttacaaaatattgttttgtagttctgactttttcttagtcttcctctaaatttgtttcaattattaactattttgtcatattttctgttataaaattaccttaattatgactgagccttatgtatttaaaaaataatttttggaagacctctttgaaagctgaatttacagttagcaataaaccataaggtataaacagcaagtagagtgagcactgggtttagaggaaaatattgtcaattggttcatagaaagggaaaatagaaaaattgaattaaaataaaaattttaaatctcacactagtaagatatatgaaattttgtctaaagttatgtaatgacaaataatatgattcttctgaacgattatagacaaataggttcctgcaagggcagtagatgtacacatactctgcattttgatttaaggattgactcctttttgaaatccaaaatgtgttatcctctataaaaagcttaaaggaagcttataatctaataaaacagggttggcatacagttgtgtttaactctgaggctttgagttttattgggagccagggcaagagaataaagggagttggtaataaattcgtaaatggacttcccattccacattggaggctttctggaagagttatttgagcttgactttttaaaggtaatgtccatgttgaaaattgttcagattacaagataataagagtagatttagatttaaatttgaaaatgaaatttgcaaacaatatgattaatgccaacacattgtggactggtgaaaggtctgtgacattattacacaggaaatgatacaaccagcatgttccccaagctgtgtttcatgggccactatttccgcctgataaatagaccatgagaacaggatggacaagtgaatttagaaataggatattatattgccctcttggagagatcagtgcctgttagccttttaaagactcttaagaggtagaagtttggtttgtttcccaaatgtatttgattagagaacaattttagaaaatgaaacacttctgccttgtttccaccagtaagggacgggaaattactcccttcttgtattttccttttagataggaatgcgtgtagtactgcgtgacatcatttaaatgaaagttgccctgtagtcttgtcatttttttgtgcatttctttcacacctaaaattaatgctctcaaggtttaaatttttatttgtaaaactggcatctttgtccaaggtaactcttttttacatccaagaaaagcaatttgtcaaaattaaagcgtactgcttttatcattatcctccataagagaactgatcatattctttttgcttatctctaagatatgcttttcccacttcttcacattcctgaaattgggatgcatgtgcaatatgagtgtgtttgatgtggtaggtttttccccctagaaaagctattttaaagtcaatgtatatgtcttctattcatctgtatcttaaaactgaagaaatgtgctcttttggtatcttatactttctttagtggtaagtttcaagtaagacaaatatgtgaagctcctgggtttctagggaacagacacagactcaggctaccttaaggagaaggcagattactgtaaacataagaagggacttaaactagaatgctctttgggtctgaggcagttttctggatcagatgtggtctctatttctctttcatggctaatgtggtctatttgtttttgcctgcctgctctttagttctactaccacagctagtcttttctcttttctccagtccaaatttagcaaagagccattctgattggtttaattatagacaccttagcggagcatagctgaggacccagacaaaggccgttaggccatcttgggtcagatgccgacagtgatgctgtcagtcgtccatcctagcacaaaaatgggcctgatgctactgccctgcagggaagggggctgggcatgctaagcattcccattaatatattcagagaaacagaagtagtctatccctggttgatctaaaggacaagtccaagaaatgacttaacaaacttcttaattatgacagacctcttatgtgaggctatgtagctgagaataaggataagagaaatttctaggattcagaagtaactggggctgcatttcagattgtcttttacttaccacctataactgtataactgtattggatgagttggagttctacaggcaactcagtgaagcagagggaacaataaaacttgaccagaaaagttatataaattatgaaatttaaaaatgtagtctacatttcataaactcagcagtttgcaacatgtgtattacactttgatatgccaaacaacttttctataacaacttaatcaatgggtatacttttgcgattttttcctctgaagttttcactctacaattcttgagattttcggctctaacgcagacatgtggattgatggttctctctcattcttttatgagtgatgaacacacagtactacttctgtgggcccgtgtgccctagagatgactgtaacctactattgatcagctgattgaagataaatggcttagctgcttgtattgcagattacatcattaacatggtcagtaaaccatgaattgttcaataaggcgtttatcttttttcattttacttttgctcttttgtcatttttattagaaaagacaaaattacccacactaaccagcaagatcagtagaaaagagatccagtagggtaccattatggctgcaaagttgcagacatctaacttctaatggtttaataatatttagtatgtttttgaactgaagaaaatatagagttttaataatcttttttgtgtttcttttacagcttccttttgcctcatatttactagaagcagtactggaaaaaataaatgaaaaaaagaaactagttgaaggatatttcacaattatgaaagatattagatgatattaaaatggagagctttattgcaaatgtgaaaactttttatgtggtgtgattggaatacatgcattgcaatcctgacacggtatctgctccaactatcaatagtcaggttcaataccaaaataagaagtctctgaaaataattaattgctgaacaagtgaaactaattaagtacatagccatttaaaaggaaatagtgtagcatctgatggtcgaatacaaatattgccacaaatcagtgcaaacttaaaaatgattttccttctagtgcattaaaagaaactgagcaggcttggtacacacaaattggcctgagcataagaagaaaaagtatcaactaaggatttaatgttttacgtttcatgaagaaactagactttttacataaaactgctatagatggccataagtggtccagggagcaacagatttgtagtatgagcaaatataaaatgaagcatcataacttgagcatttattgaaataaattgtgtggtccaattgaatctgttctcattgatgtgctggtttatgtaggagatactgtgtatttctacaactctttggcaaaaacaaaaacattttcttcttctctctcttaacttcacaatactatacgttgtgtagtcatataaatttgcagggaaccacaaacccaatgtataaaattaggctctatttaacagaactactactgtggtcagctaatttaagttacattcttaaccatgatgtcatccttatttagattcctggacattcccacctcatttcacctcttcaccgtgttcctgccataccctttttggttcctctaattcaccatactggtgcctgcctcccacatttgcccttggtcttctctctttctagaatactctgcactcaactttcctcatggctggctccttgtcatcattcagctccaccttccccggtccctcagagacacattctctgaccagcttactattttatttcctcatagcacaaaattatctatctgttcatgtatttgttttcttgtttattttcttcttttccctctttagtatgtaggtcccatgagattaaggcaagggttggcagattatagcctgcagggcgaatctggcctgccacctgttttgtatggcccacaagctaagaatggtttttgccttattaaatggtttttaaaaaatcaaaaggagaataatattttgtagcatgtgaaaattatataaaattcaaattttggtgtctgttaataaagttttattggaacacagtggtgctcattcatttctttactgtttatggctgctttcacactacatgagtgtagatgaatagtagttaatggaagagactgtgcttctctcctgcttggaatgctacagataacaatgacacagttacaacttgacagaattttaggtgacacaaatactgccttactgcaattaaaaaaaaaataccagtacacacttttcatgtcaaaacaggaaaagaagaaagaaatgaccatcaaatgtcacacacttaaggcacaatgaagtgtggattttgttattgaattggatggcgaagcattgtgtttattatgtgatgacactgtatacccaaagaatgcaattaaaacattaccatactaagcattcatcacaatattcccaactcacaggaaagcacgagtaataaaaaattacaaaacttaaaatgtaatacctcattacgacagaattttattacaaagataaaaatgagactgctagtatgaccttgataccaagactaaacaaagacagtgtacaaaaaaagaaaatatggtagactgagaaatggcccctgaagatgttcactccttagtccccgaaacctgcgaatgtgttactttatatgtcaaaaggaaatttgcaaatatgattaagtcaaggatcttgaatgggaagattatcttggattaccgatgtgagcctgatgaaaccacaagtgctcttatgagagggaggtaggaagagtcagagagagagaataatgttaccagagaggtagaaagagaaatttgaagatgccacagtactggcttaaaatatggaggaaacggccatgagccaaaggatgtggatggcccttggagaccagaaaaggcaaggaaacagattcttcctggagccttaggaaaagctcagtcctgtcagcaccttgactttaccccagtgaaactgattttggacatctagaactgtaagataatacattttatctaatttaagccactaagtttgtggtactttgtgactgcaacaatagaaaacaaatagaatttgccagaaatctgtttagaagttttacatctatgttcatgagggatattggtcaaaagatacacaatcaaagctggttcaatcagtgtaaaccaccatattaagaggctaaaaataccccacaatcataaaatttgatatagaaaaagcatgtgacaaaaattggcactcatttattttaaaaaaaactcagaaaactataaataggaacttctcaatttgataagaccatcttttaaaagcctacagctaacattgtatgtaatgatgaagaccaaacacttccccctataatcaggaagaaggcaaagatttcaactctcaccactctctctcaacataacgtgggaaattctagccagcctaataaggcaagaaaaggaaataaaaggcatccagattggaaaggaaaaagaaaaataaccactcaaaacaaaaacaaaaaactttacagaattaatgagtccagcaagatctcaagatgcaaaatcaacatggaaagattgtgtttctatacactagtaagctagtaaaaaaatgtggaaaatgaaattaaaaatacaatacaatgtacaatttcccgaaaaagagaaatacttaggtataaaacctgcaaaacatgcatagtacttgtgtatgaaaattataaaacactagcgaaagaaatgaaaaagatctaataaattaggagacatagtaagaccatgggttaggatacttatgttaaagatgccagctgtctccaaatttatatagagatttaacacaattcctaccaacatcacagcaagagatttaggaaatagagaacatttttctaaaatgtatatgggaactcagaaactagaatagcttttaagtaaaactaagagcataatagtgggagacatcactttacccagtttcaaggtgtattaaatagctacactaatcaggagtgtgtggtgctggcaggtagagggctggacaaataaatcaatgaaaaagaatagagaaccaagaaatacacctaagcaaatatgcccaactgatttgagacaaaggttcaaaagcaattcaatagaggcataatcacctttttgacaaatggtcctgaagcagttgggcatcttgggttaaaaaaaaaaaaaaatcttgacctaaacctcacacatcacacattcagacataaattacatcaaaatgggtcaacatttaaatgtaaaatgtagaatataacatgagagaaaatcttcaggacctcagatttggtgaagaatttctagccatgacaccagaagcatgatgcaaaaaagaaaaattgataagttttacttcatcaaaattaaaaactttcaccctgggaatagacaagctacagactgggagaaaacatttgcaaatcactgacaaaggattcatatctaaaataaacaattcccaaaactcaacagtaaacaacaacaaggcagtcctctgtgagtaacatttatttatatcctgggaaattatgaaataagcttggggctatggctgctataagtgaaagttgtcatgtttatgtgtgtttcagaatatgggacagcggaaagagtgaatttcattcttcaacgctagcccttactcatctactgacagctttgcctattttaatttcttctccatattatgcaggattcttcccagtagcaaaaatgacctttggatttagagggtcgaaagtgaaaattactataataaatttgtagccacaacaagagaagcttacttaatgttctcaaataactgtaaaaacaacaaaatgtaccagaaaacatttgagagagccttttattggcctatgttcagaagagttcatgagatacatgggcagaagagttgctatttttttcctcttaaaaaatttttaattgatacataattttacatacgtatggggtaaaatagaatgtttcaatgcatgcgtacattgggtaataattaaatcagggtaattatatctgtcacctcaaacatttattacttatttgtcttaagaacattcaaaatcctgtctttattttattttagattcagtgggtacgtgtgtaggtttgctaaatgaatacattgcatgattctgagctttgagtttctaataatctcatcacccaagtagcaaacagtacctgatacatagtttttcaaccctctctccctccttttccccacttttggaatccccagtgcttattgtttccatctttgtatttgtgtgtacccaatgtttatctcccacttttaaatgagaacatgaggtattttgttttctgtttctgtattaatttgcttaggtcaatgacttctagctccatttccactgttgcacaggctatgcttttgttcttttttatggctgcatagtattccatggtgtatatatcttccacattttctttatccaatccaccattgataggcacttgggttgattccatatccttgctattgtgaagaatgctgctatgaacatacaaaagtagatatcattttaatagaatgatttactttcctttgcatatataactactaattgggttactgggtcaaatagtaattcggtttttagttcgaagagttgctatttctaattcctacatttccatgcacgtaactgcctttggtattaacacaaatttatataagtggcttaatataatggataaaaatgacttttttgttgcctgtgacatgaaatctttcatcaaaaagatgattttttaaaaaagcttcgacttttaatttttaaatacacagacatatttgatcagaaatttttttctgctcaccaaggaatggtagacactacaaacacttctgcgcatagtccaatcctcagtttccttctttcttcagcagacacagtctacaaaaccagagttttgacatcagctccttccaacactttttgccacattcaactttcctttcacctaggaaatgatcattagggataatttaaaagaaggtggtgcccctgccttctgtactcttacattttgtgttagagaaaatgttgctctttgttaatgctgaccctagcgtgaaggcctcagagtcacccagagagaagtattagagacttccctgggttcatgctccaccctgtaggtcagaattgttttagcatacaaccctctgtgttcttccttagtgcactaaccgtgacactctcctcatgaattcagtgatggacccaaggcagaaaaagaaaagcatagtcaagacatttttattttccagatttttctttatttttatatgacattttatttcaagataatttaacattcacaagaagttgcaaaaatagtaagcagagtttttgaatacacttcacccagattccctgaatggtaacatcttacataaccacagtacactgtccaaaccaggaagatggcattggtacaatatttttaactaaaatatagaccatagatggatttaagtttttacattcacttcgttggagtgtttttaggacattttgtcacatgtatagattatacaagcattaccacaattgagatacagaactgttccatcagcacaaagactattcctcatgttaccccttagcactcacaccctccctttaactctaatccctggccgccaccgacctgttcatcatcactataattttgtcactgagagtgttatataaatggaattatggaatgtatagccttttgacattggcttctttcagagagcataatgtccttgaaatccatctaaatcattgtatatatcaatagcccacttatttttaattgctgagtagcatctcattatatggacataccacaattggtttattcatttacccgtcaaaggacacgtgcaattacacaccactcttgaaggtcagggactaggaaagaatatgattgaaaaattggttacaatgaaatctggagaagaggtttttagatggacccctctgaatgagcaaataatgtgaagatatttacatcccatgtcatgctcaccaaagggtgacctcagcgaggaggattttaataatcaaattgataggataggataacctgctctgtagatgcacgtcagcttctttctccaaccacccctgtctttgcccagtgggcttctgagcaaagtggccatggtggcagggatagaagttatggcatatgctcagaagcaggaattttcactcaccaaggctgacctggctatggccactactgagtgcccaatctttcagtagcacagaccaacactcagcccttgatatggcaccatttcctgggggtgatcagccagctacctggtggcatgttgattacattggaccactgccatcatggaaggggccaggttttgttcttactagaatagacactctggatgtgggtttgccttatttgcacaaaatgcttctgccaaaactaccatctgtggacttacagaatgccttatccaccaccatggcattgcacacagcattgtttgtgatcaaggaagttacttcaagcaaatgaagtgtggcaatgggcctgtgctcatgaaattcatgttcgtcaccatcctaaatcagctggtttgatagaatagtggaatggccttttgaagactgttacagtgccagataggaagtaaaactttgcaaggtatggcaaagttccccagaaggctgtatacacttgaaatcagtgtctaatatatggtgccatttctcccatagccagggttcatggatccacaaatcagggggtggaattgggagtggcacctctcatcattatccctagtgacctattagcaaaatgtttgcttcctgttcttgtgactttatgctttcctatcctagaggtcttagttccaaagagagagatgcttccaccaggagacacaacactgatttcattgcactggaatttaaaactgctgcctggctgctttggcttcctcatgcttccaaagcaacagacaaagaagggggttacattgctggctggggtgagtgatcctgactaccaaggggaaattggactactactctacaatggaggtaaggaagaatatatctggaatacaggtgatcctttacggtatctcttagtattactatgccatgtggttaaagtcaatgaaaaactaccacaacccaattcattcaggactgctaatggcccagacacttcaggattgaaggtttgggtttcccaccaagaaaagaactacaaccagctgaggtgtttggtgaggggaaagggaatagggaataagtagttgaagaaagttgttagaaataccacataaccacagtgaccatatgaccatagtgaccacatgaccaattacataaatgagaaatacatttatctgagtatttcctccatattttgaaatgaatatgtttgtgcatgtgtgttcagttgacaagggtggacttgatgaattttgtgtgtcaacctgattgggtcatggtgctcagatatgtggtcagacattctggatgtttctgtgagcatgtttttggatgagattaacctttaagtcagtggactttcagtaaagcagattgccctccataatgtgggatgggcctcattcagttagttgagtacaagaaaaagactactgtcccccaagcaagagagaagtctgctagcagtttgcctttggacttgaattacaacattggctctttctgggtctccagcctgcctgcccactctgcagattttggacttgctaggctccataattccatgaggaaactcctcagaataaatctgtctgtttccccatgttggttctgttttcctagagaaccctaatacaccaagttttggctattgcatataaagctatcatgaatattcaagtacaggtttttgtatgaacataagttttcacttctctagaggaattacccacaaatatgattgctgggtcatatagtaagtgtgtgtttaaatttataagaaactgcaaaagtgttttctagggtagctataacactctgcaaccccaccaaccatgtctgagagatgaagttggtctgcatcttctccaggacttggtactcttaatagttttaactattctaatgggtatgtagtagagatatttttctttttgagttctagtccagctccaccattctcaccccaacatttgtcatcattttttgtttttctgtctccaaaacctgcttatgtggtctttttagaaagcatgggatgataaggacaggttgatgggaattggatcagacatatataactcttctccagaactattacctggacaatcacctcccagcaattatcatgggttttacaaggaactttgaaaaagcaggtgtcattatctatcactgcataataaatttctctaaaacctagtggcttaaaacaacatttatttgggccagtgtctgtggatcaagaatctgggtcctctgacactggatctctcacaaggctgcagtcatcgcaaggcttgactcagaaggattcacttcctagctcttccatatggctgttggcaggattcagttccacacagttcagttgttctcagttggacttagggcttccttgctagctattggttggagtctgtcctcagtcctttgccacacgagtctcttcaatatggcaacttgctttatctctctctctctctctcacacacacacacacacacacacgcacacgtgcacacccacacacacacaccaggaggggattagacaagagcgtgaataacaagtggtgggaattattaggagccatttcatgagctgcccaccacagcaggtgtttaggtttggtgctctagataaaggggaggctactggggaaattgccttgaagctgtctgcaaggtgagcatagagtggacttagaataaatatttatttgtgaaggtttaggggaggaagacagatgcagcttatgggttgcaaaattacaactacttcttggtaccaccataggatatacataaaaagaaccctgcctagagtgaggtctgtcacataaagatgctcaacaggtgaaattatggaggtatttaataccatttctagacttgagatcaagaggttgggacagcacaattattcttccacagtaaatgaactaaaaccagtgtcagaaatctacaaatttaaaaggccaactaagtccattctatagacctttctcagatttgaactgtggaaacaatgttgaaagcaggaagcaggcagtgtaaagcattagagattcaaagccaaagtagaataagccctggacccctgaaatctacataccgtatcagtagccttaggaggccttttatcaatttaaactgaagctaaagaatacttttcataaaaaagaatgacatcatttcctttgcagcaacatggatgcagttggaggccattatcctaaatgaattactgcaggaacagaaagtcacataccacatgttctcactttatagtggaagctaaacaatggtccacatggacataaagatggaaacagtcgactacaaaataggggagagagtaaaggggcaagtgttggagaaactacctgttgcatactatgttcactagaagagcagcaaaccccagcgttacatagtacatccatgtaacaaacttgcacaggtaccccccaaatctataattaagaaaagaagagagttcaaaaaagaatacttttcaaaacatgtattttcacagcatattcatactcctaaaaagaaataccagaatctgataagattagttacgtctggagagaggactgggagctctgtgctaggagacacacaggacttttatagtctatcatttttttgtttttgtttttgtttgagatggagtcttgctctgtcacccaggctggagtgtggtggcgcgatctcagctcactgcaagctccgcctcccgggttcacgccattgtcctgcctcagcgtcccgagtagctgggactacaggcgcccaccactatgcccagctaattttttttgtatttttagtagagatgggggtttcaccgtgttagccagaatggtctcaaactcctgacctcgtgatccgccctccttggcctcccaaagtgctgggattacaggccacggtgcccggcctagtctatcattttatactggttgaattatgttcccatggacataaattaaaagaaaaatgaaaatacttttaataacaattttgactcttttaaaccatctgtgaggcaaagataaataggatggaaaaggcaaactatctagaaaataatgaaaatgagaatactttttttttttaatccaaaaacctatgagacatagctaaagctctatttaaaagagaattaatagctccaaaagtgttcatgttaaaaatgaactgaaaaaattaaatatagaacttaagaaatataaaatatcatgctgggtgcagtggctcacgcatgtaatcccagcactttgggaggcccaggcgggcagctcatttgagcctaggagttcaacaccagcctgagcaaaatggcgaaaccccttctgtacaaaaaatacaaaaaactagcctggtgtggtggcatgcacctgtagtcccagctatgcaggaggttgaagcgggaggatagactgaacccaggaggttgaggctgcagtgagctgtgattgtgccaccgcactccacactccagcctgggcaacagaatgcgaccctgtctttaaaaaacaaataaataagaaataaataaaatcaaacctaaatagaataggaggaaagaattcataaaagtgaaattattttaaaagaaaaacaactgaaaaaaagatataacgaagctgatctttacaattaaactaactctggtaagcctagttaaggataaaagagaaaagtgaaaacatgcaacattagtaattagaaaagatgcaaaaggcattttaaaaattgtgaaagaataggtacaggtcaattttaaggtaatatatgatttgctagccaaatataaataacccagattcacttaagaagtggtagaaagtcagccaggcacagtggctcacacctgtaatcccagcactttgggaggctgaggtgggaggatcgcttgagcccaggagtttgagaccagcctaggcaacatagtgagaccccatttctgcaaataggttaaaaaaaaaaactgggcgtaatgacacatgcctgtagtcccagctactggggaggctaagatgggaggatcgcttgagtctggggacttgtgggtgcagtgggctgagactgcatcactgtactccagcctgagagacagagcaagatgctgtctcaaacaaaacaaaagaagtggtagaaagtcaaataaaccgtgacacataacagaaattagaatatagataaagatctgccatttagaaaggcagcaggaccagatgactttatcattaacatcgatctagcctcaaaaaacagacaattccttttcttataactacacacagaagaagatgaaaggatcccataagtgatggtatgaaacaaggataggctgaataacaaaatcagataaaaatacctaaaaagagaactataaatcaatatttactaataaaaacataagtattctaagtaaaaatagaaattttagtttattcaaaaaacagcatacttggccaagtagattttattccaagtgtactggtttttgaagggaagcccggcctagatcagctgactgtcagccaagccatagactcctgagcaatattaatgcttactgtggcatgccactgagattttgtagttgtttggcatacagaattattgtgactgtaactctagttaactattatagttagctcctctgaaccatgtgcctttatgaccttttccacttgttccttcatgttcttttgtaggaactaaagccagcattttgaggatagaagccatgtgctaggataaaggaaaagaaaactagaaggaacctgggtcctaaattaccacagggctaccatgtagccctggactacctacactcagatgtttttatgtttattccattgtcatttttggtgctctggcatatgaagtcaaaccaaatcctgacttatatacaaatggtctgtacattgtcaaatcctatggccagttttcagcctttctcctacttcatccgtcagcaacatttggccctgctggtcacgctttcttgaaagcctgtcttcactttgcttcttgtaccccactctttcatgaatcttcttttaactcattggctactccttctcagcctcaatttctagatagccctcatcttccttaattctaaatgttaggggtactaccaggctcacttttaagaattttttttaataaatattcagtctgtagttgatcttaactaattccttgaccttaagtacaatctataagctgtcaactcccaaccttattttccagccctgacatctcccctgatctcatcttactgcttattcaacatctctacttgatggtctaataggtatcccaaatgtcacatgtccagagctgaatttgtgctgcattcctatcactccccccagtcagtaagtggcaaccctaaacttccattttgttaggccaaaaaatcttagcatcatcctgtctcctctttttactcatactcccttcaatgtatcgggaaattctactgactctaccctcagaacgtatccagcatgcaacagctcatcactgccttccccatttccactccagttcagaccgtcaactgaactactgcatcactttaattggtctccctgcttcagctgttgctctataatacagcatattcaccacccagctttcatttaaaacacatgagaccatgtcattcctctgctcacaatcctcaagtcacttcccatcttactcaaagtaacagaagagtctttccttcagccttcaaggcctgcatgacctggccaccagttctctatcacacttcatcttcttcctctccttatactcactccacatcactacagtggcctcatcaaacacactcaaactgtgcccaactcagtacctttgcactgcagttctctgtctggaattctgtctccctggcagccacatgattttatccctcctttcattcaaacctttactcaaagacacctctttaaagaggcttaccctgactacattctccacagcaacatatttcacattgcactctctaccatctaccctgccttatctttcttcttagtggtaccatgttgcacatatctgtgtatcacccatctcttctatagaccgtaagtcatgtaacagtgtgggggagaaaaaggaataactttgctcacccattgcaagggttgtggctgacgctcctgtaacaaaagattaacaagagaaaagcataacaaatttattcaattaatgttttatgtgatatgggaaccttcagacatgaagacccgaagacccaggaaaaagggtataactttatacccttaggttcaatgaagaaggaacagttgtgcagaaatgtaactggacaaagggggagtctgacttcacacactacggaaaactcaacagtccctatttgtttagattcttcttggccccccctggataatatgcctttactttgggtatagggtgggacatctgtcacatcagggtcctatggcctactttcatggagggtaagtcagcgaacccctttatggccagctctcacatagacgggtggaaggtcagagagtggcctttccatttctgctgttttctcagtttccaaggtgccatattttgaggtagcattttctgagccccaacaacagcaagaacttgatctagattttgtctctttgttttgttgttatagatgtaatcctagtgcctataacagtgcctgacacatagtaaggatcaaataaatattcattgaggaaaggaatctttctatctcgagcacaatctttccatctcctggaatgcagtgggcactgcaataaatgttacattcctaaagtaatgggatcaaaaggtatcttgagttgaatcctgtcccccaaaagatatgctgaagtcctagctctcctgtatctcatttggaaataaggtcttggccgggcgcggtggctcacgcctgtaatcccagcactttgggaggccgagacgggtggatcacaggtcaggagatggagaccatcctggctaacatggtgaaaccccgtctctactaaaaatacaaaaaaaaattagccagtgtggtggcgggcgcctgtagtcccaactactggtgaggctgaggcaggagaatggcgtgaacccaggaggcggagcttgcagtgaaccaagattgcacccctgcactccagcctgggcaacagagcgagactccatctcaaacaaaacaaaaaaaaaaagttaaaaataaataaaaataaaaataaatgaaaaaaaagaaataaagtctttgtagatgtattcaagttaagaaaagactggattagcatgagcccacattcaatacctagtgtccttaggaggggagagagattgggagacacaaagatacacacagagggaagaggaccatgtgcagacggaggtatagtttggagttaggctgcctcggctgaaggaaggccaaggactgccagccaccaccaggagctagaacagacccatgggacattctctccagcaaggccattggagggaacatggccctgaggataccttggtcttggatctccagcctctagaagtgtgaaggaatacatttctgttgctttaagtcattcagcttgtggtcattggttatggcagccctgggaaagtaatacaaagggtggggagaactaggctttcagcatgatcagttacctcatctgattaaatgccagaattagaactcaggccttccgactctgtgcttctcaactttatttcctttaaccaccccccaaggagcctctttaggctttttttcttccctaatcacctcctacccccacctccataaagttttttttctttttcttttccttttttttttttttttttttttttgagacggagtcttgctttgtcacccaggctggagcacagtggcatgatctgatctcggctcaccgcaacctctgcctcctgggttcaagtgattctcctgcctcagcctcccaagtagctaggattacagatgtgcaccaccacacccagctaatttttgcatttttagtagagatgggggtttcaccatgtttgccaggctggtcttgaactcctgacctcgtgatctgcctacctcgccctcccaaaatgctgggattacaggcatgagccaccgtgcctggcctccataaagttttaataccacagatatgcagtatactgtttatgtgctgtggccctttgaagggccatagatcattagaatatctaagttttaagattttgcccctccttccaagaattccaaatttttacctcctggcagagggaagtgtggcattgataatgcatgctttcaactgaaatattatctgataatggccataaatgaaatatttatttttctgttatcaggaaaagaaatgtaggtacagctcatgaatatttatgtcagctctccctctgtcctatgatgggattatacttctatacctgctcagaagtggagtgaggccctgtgacttgttttaggcaatgaaatgtgagtgtaagtaccatgtatcaccttccagtagaagctttgagacattgtgtaattccctaccttctccttcctgcccctgtaattatggaaacacagggtgtgatggagcctctgggagctgggaccccaagtgagagtgatgaacagagcttccctgatggctccctgtgcaccacatctatgaataagaaataagcttctgctgtgaaaagccactgagacttgtttgtttagtttttgagacagggtctctgtcacccaggcttgagtacagtggtacgatcatggctcactgaacctctgcctcccgggctcaagtgatcctcctacctcagccccctgagtagctgggactacaggtgtgtgctaccaggcctagttatttatttatttatttattttttaaagagagggcttcattatgtttcccagactggtctcaaactcttgggctgaggcattctgcccacctcagcctcccaaagtgctgggattaccagcgtgaaccactgccccagccaccactgagatttgagtgtttttttttttttttaatcaaagaaaaacgtatcccttcctcacaaacacagtattgcatgagggaaaaagtcagatgcataaaattaactgttcttttctccttacttttaatttaacatggtactcacaagggaaaataaaaactccaataatgttttaaaatgtaattaaatagaacatttctgagcttcttgtttaaaacttaacttctcactcacttactgtatattaaattctgaaacataaataaaacaaaggttcactgctctagaactctaagttagaacttcaattcaagtatagattgaactgttgtaaatacatgggatgcagggagacttgccaggactgagggctcaaagctttttttacactttctttgcaagatatatggtgctggatcatggactccatcaccgatgaaaaataaaattatgtgtttattggatttgagtgaccttttcttccaacaatctcaggaaaccaaacttttagcacatccactccttaagtaattttaacatgcagagaggatgagaaggtcaaacagttacaagaagtctgctagccaatgtcagcggaatgcattaggtgtcagtagagtttctatttcaaatattaacaaacaggacataaagctacagtatagctggggtgaagcaagaggcatgccgggaaatgtgctaaataaccctcaggaatcgggcagtgcagccagccttctcagagagtgcaggagaggaagaagtaaaaggcaatgtttttaaaaccgaaagctaggatttttatcaggaaagatgcctcacactggagccttaccctcattcaaatatttattttgcttgtgtaaattcagtcatttgtaaaggtagaaaactctcttttccatttgcttcattaattactgtttgcctcctttcactgaacaaattttgcaagattttatgaagtgttttctttgtctgatcttctgtaatagccacctatagtttttgacactggaagtggattcagcccagaaaacagagccactgcaagtgttacaggggccaaaggatttaataaaggaattagggttatacatatgtgggagagctactgggagcgtggggctgaacagcaggtagaggatcagagaaacagtcccttaataacttctgcctaaagagctggagcaggaagggaagctgttctggccaccaggtcctcctgagaataacagcttagcttttcaaatcccatgcaagttcctctcactggcaaaatccaaccctgaattgtatgggaagggcattctgaaaaacatggctccccgcttggaggtgagaggtggtactgctcagatgaccaaatgcaatccagcatagttaattacacatgaaaagggagctctatttattgaagttgagtctgtttattttaactgataattgggttgcaagctaaaattatgaattcagttcagtaagttgctctgttaagagcaaaatatcagctgatgtatttttagtttttcatgaaatgattttcatcacatttgagatgtgtgtttgcaacaaagaaaagctctaatgctagtggtcagggcagcatcccccaccctgccttgttgccttggcgatggaggctagacaatggcaatattttgagtagcctattttgtcttcatcaagaaaataatcgaagctgcttcttcttctggttctgaaacgtaattcaggtctgaagcatgaaaaattctgtggattgttacttgcactagaattgaaaactggcttgtaataggagtctataaatgaataaatgagcatttaaactgtttatctgtaagtaatctaactagacaaggcacgagataattatcaaggtgatgttttaaaatgaagaagaaaatccacaggctttggttaaagattctgcattatttaggatgtgattcccaaaccttcagggttcccagaagacagaaaagaggccccttgtggtttagaaaagctagagagagagaaagggagaaaaagagagagagagagagagagagagagagaggaaatggaacataaagaatggtaaaggcagctacaaaggcactaatagagcaatcttaggtgtaagtaagaaaagagaacactcctgtgatcaggttctgtaacaagctgaacagaaatgtgatttagcttgttctagaaaaggacgactagcaagagacttgcttaattgaataattctttttttcccccgaattcactcttgagtatgtctggtgtggataatacttgtttaatagcctagcttttagccatttttacatagagaaacctattccttgaacaaaagccagactgcattttttcagcttatttcatatttaggatcgcccttttctcctagatggtgtggaactctactatcaccaggtggcaattcacaactttgcaggtgagagacaaaggtgaaaggaaactgttcctttcaagtgctaacagcattgcaattatgatcatttttgacattacaagccataattgccaggacaaaatgcatttcagagtttgggctgcttcaacaagtcctgaaaaattaattactaacagtttccttcagagttgctctaaaaaattgcaaatgctgatttatttatagctatagcatttcaaagattttattttttcccttaaaattgctgtcaatattgggaaaacctgagtataattctgcctatattattttctatcatattgggttgtagaatcatgacctgttagctcaaataggcattagcaactactgtttacaatgagatacccccaccccacctgtatgcattttctgctatactttgctatgatagtctcagtttccagtctcctgtctcctatgacataggactacctagctcccagggattttttaaggattaaggaggtaataatacatggacgtggctagtatagtgcctgccacatagtaaatgctaaataaatgtcagttgccttccctccatccatacaatttaggtgcgtaatgggatgactaccgattgtcgagctgtgtatcaggcattgtgctaaccggtttcattcctcaaacagccctataaggaaaaggaggctcagccgctaacttgcccaagattccacagcaaatacctggccgacctggaaattaaacctcaggactttcaaaccctttactgctatgccatcctgaccttgattcttcacaccaaatatgaaatcccatcatacctcaggcagccttttcatcacttcgggggctgggctcctatgggagaaagattcttgtggttttacgacatttagtttttgaaactacagtacagccttgccaatccctaatgcttgagattgacacagagaagcagacttggctggcacacaaccgaaagtcggcctgccttccctccaaggtacaaggatattcaggctatctagctttttgtatgacacacgtgagactaaactaaaaaaaacccacttttttaaaatttaaaagatacttttattccaaggattgatgcccaagcgtgtatccaacgctgccccctgcccaccttgattttccattcacctgcatgatgcccgctgacaaaattctcttgattcctgtctacttctccaagtaccattaaattctgcttctctcttcctggttcctgtgatttccagagagtcactgtcttctcatttggtgcccagctttttgggctccaaaaaactccatttccaaaatcactgagtaaaaggtacgaatgtccctctgggtatgtggataggttggaaacctttagaatgcagatgcctagagtatgttgagaggcccccagtttcatcaccaccagagagcacctttatgaccaatgttgacactccactatctggataatgcctcatctaaaaaagccttataaccataatattggtcctagaacgtgaacaggggttttaggtaacttctgatggacttatacatacgttttttgtttttgagatggagcctcactctgtggcccaggctggagtgcagtggtgcaatctcagctcactgcaacctccgcgtcctggttcaagcgattctgctgccttagcccccttgagtagctgggattacaggtgtccaccaccacacctgtctaatttttgtatttttagtagagacggggtttcatcatgttggccaggctcatctcgagctcctgacctcaagtgatactcctgcctcagcctcccaaagtgctgggattacaggtgtgcgccaccatgcccagcccatgtatatttcttcaaggtgccttacctagtgaaaataaatatagatataattctaccttgatttttcacagtggaaaaatgaactggaagattatcttatggattatttgctttgtttttatttaacggtagaactgaatgaacttcagccatgtacaatcctttttttgtcatttgcttaatatctctgagacttctagaacttttacactaatatctcaggaagtagaatagctggtatcttttgaaacttttaagagggaccccgtaaagaagcttggtcctataacagaggaatcaattaaagcttttgcgttaaggagcactcatcagttgaacatattcctccattacagggttgacccctgtggatctgtagaaatttctttggtcaaaaaacattaagagcagttttcactaataaatctcttgctttttcctcttagaaacgtccctttactcttatgtcaaatgtgtgaaatgttttctaaaatgagaaaggttcaaaagtgactatttgtaaattgacaacctgtatgtcagctttctgtatataccagttaatggtaatttgatatttaatcagagttttccagagaagcagaactaatattctgtatgtgtttatatgtatgtgcatacatatgtattttatttatttgtttgttttgttatttagttattataagggattggctcatggggttatggaggctgagaatttctaagatctgccattggtaatagagacccaggataactgatgatgtactaccagtctaaaagcctatatttcagtttgagtctaaaggcaggagaagactgatgtcccagctcaaggctgtcagtcagtgggagtttcctcttagcctttttgttgtattagggcttccatcaattgaataaggccttcccataattagagagggcagtctgctttattcagtctaccttttcaaatgttcaaatgttaatctcatccagaaacattctcatagacacacccagaataatgtttgaccaagtgtctaggtactggatgtcccattcaagttgacacataaacttaacaattacaatattccattgctcataacattgaatgcagcttaaactttcattctcagcttatattaaggctgttaagaacttgactatttgttgtaaactttaaatccttctctttgttaattatgattcagtagctctatcaaaacacattttatgtgtgctttaggcatgtttttaagaataaaaccttggcttgtataatacatgtatttccaagtttaggctctagagagttacaaagaaaaagaaaagcagcccctgacacctgggagacggcttcttactgtccacttgtcctgttgttgctaggagctagccttggtattttcctcttaaacaatttcacagaatatcaaaatcagttaagaccactctgtgaccatcagaaataaagacaaaaacaagatcactctcaaatcaggtttgaacatacacaataacatagacattgttggacattttactaatttgtttcatttcataaagaaccctatatggaaaatgaggctcagctgctaacttgcccaacatccctcagccaaaacattacccaaaccataaaaatgaccaaaatatccctccatcctgattaatatgcgtgactattgtaaactttaaaacttaactgataaaaaaaaaacctttcagtcatttttgaggtactgcaggaatattaagtacatataaacagtaaatattttctaaaagaaaggtaaagtcactaaattatgtttctttttatgggtactggaaagtgtttttatataataacttgtttttatagctatgagatagaaaagattttaacttcaaaataaaagggaatattggcatgattcagagtttttaaaaactggtttaccatataaaaatgttgttagcataacattttgatttgttcaagaccagtgttatttcttataattcaaactttcctacattggtttgcgagttaaatgatctacgtatgtttctgtagcttgtttaaaattaaaaattacatatgtaattgtattcaactaaatagaatgataataaatatccttttaaaagacctaattttatgaaaatgtataatactgtaaataaaaaatatgttagctaatttgaaattaccagatccttcactaaatttaaggtcatagagaaatgactgaattcattatgaaaagatctttgaaggcctaaacaattactaaacaactttttaaagacatacaaaacactggttatgaaacatgatttgactcatttcttaaaataacaatacattaacaaagcatacaaatgtctttggacatttttatttttatttatttttctatttctatttttattttttttgagacagagtcttgctctgtcgcccaggctggagtgcagtggcgcaatctcggctcactgcaagctccgcctcccgggttcacgccattctcctgcctcagcctcctgagtagctgagactacaggtgcccaccaccacacccagctaattttttgtatttttagtagagacgggatttcaccatgttatccaggatggtctcgatctcctgaccttgtgatccacccacctcggcctcccaaagtgctgggattacaggcgtgagccaccgtgcccggcctggacatttttgtatacatcatttccctactcaaaatagccaaaatgatttgaaataagtgctcatagagcaataaataaaattaattaggtatgtctaaaattctctaaactgtaattaagtaaattactataagagactttgtctaccagacttagtacaaaaaaactgacaaattataaagtttaacttcttttgataaataagttgaatatgctaacgtaaatatctttcaattactgaatacttccaagttaaaaggaacatctcatgctaaacatctcagggcacaaagattgataagactgatacaataagtgtgcaccaaaatattttccagaattctaaattcacaaatatttttctcttttactcataaagggtctggacatactgtaatgggaatcatttgaaacctattgcttctttcactctttcattagccccaatagccaagtcatacgtatattctctaagagctttaagaacaatagtaaaacatgtaaaaaaattaattaatttagctctagagtttccactaaataatgattatcatgctttacaaactctttaacaaaaatgcttacaatttttcagttaagtcacctaatctctcttttttttttgaggcggagtcttgctgtgtcacccaggctggattttgaggcggagtctcgctgtcgcccaggctggagttctgttgtgcaatctcagctcactgcaacttccgcctcctgggtccaagtgattctcctgcctcagcttcccaagtagctgggattataggcgtgcatcaccatgctcagctaagctattttctgtatttttagtagagatggggtttcaccatgttggccgggctggtcttcaactcctgacctcaagtgatccgcctacctcagcctcccaaagtcctgggattacaggtatgagccaccgtgcccggccacctaacttcttataaaaagctttcccttgacacatcactgtccattactgtgacactccaaattcagccacccgccctcctttacctgaaaaagaaagaaatcccattgttcataccctgcacagcctttctactgatttgattatctttgttaattctccatatttaaaaagaaaaactaaaacttttcaagcaggctatactatcagagaattaaatttatccttaaatagatagaagctctcactgtgctctagttgataaagttgtttcccatggagtacacactgacaattctgattctgcgatgcatgtatactgggacggaagaattcagtacattgatggcaaatggtgggagctaggattcttactggtggagtgggtacttacagataagcaaggggaggagaggagagtgatgtgtgtggtaaagaattagagttggcaatatcagcatgaactcagctgagacagcctggaggtaaaggcactggagtagcaacaagcacacctagcactcagattttggtttccaataagaggaaccagggctcttgggagaaatggctgattctggaattggggcaggaaatatacaagatgagcctggagtgttgtgtagtgccagaaggtaagacagtgctcaaagaaaaacaaaacacaacagaaaatcctgcattgatgggggtgtgtcaaagagatacaggagccaggggaaaagagtccccagtggctaaaactggaacaatttgatcaacaaaataaatattttgtggcacacattacaaaataaagattaatgagtccatactgacacaaataatagattgaataaatacctgaatatatggagaagaatagacaagtctcccaagcagaagaaaataaagatagaagaaacatagatatgtttccaagtaatttatgtagaaactctgccctcaaaagggctggggaaaaccccctactccttatgtgtgggctgcatgtagtgactttttcctgaagaacacattatagaaagcagggggaaaatagcagctgtacagtggagaaacctgacaaacactacctcagccagctgatcaaggttaacaatggtgataagtctcattggtaatactgtgtgtaccttcacatgctgtgatgaaaatggagctttacctctgtggtctttcttccccctaatccataatcccagcttgattatgaagaggacattagacaaacgccagtgaagaagcatcctacaaaatactcgaccagagctcctcaaaactgttatgctcatcaaaaacgtctgagaaactgtcccacccgaaaggacactgaggagatatgacaactacatgtaatatggtatctgggtaagattctgcaacagaagaaggatattcggtaaaaataaggaaatctgaataaactatggatgttggttaataaaaatacatcagcattggttcattcatggtaacaaatgctctgtacattaaaaaatccagagcaaagccctacttccttaagccttgaatgctgtagtaagtcctttctgacacattcttagtgagatgtcccatgaagtgtgttctctctcaatgccacgtgtaataacacaactccaggtgtatttatagtgctctttggcattggcaaagccatgattcaatcaaatccatgatgacccttaacaggctgacagtggggagttttagatttatgttttctgagaagaaatcctgtttttggcttagtgttgttgttcttatttttattttttaaacttttattcaaaatatcatgctcttttttaatagtatagattctcaacaagactaagtatttctctaattgacctcaagatggcaggcttgaataaaagatatttccattttaaagttctgggcttctcaaaaattctctttgaatttggaattacaaatgaatgctgttttcctcactctttgtagactttttttttaagtatctgtttcttttatatttgttttcttaattgtctcctaaagggttatgacattttattcaatttttttttcttagaatatcaaagacagtcataagaatctggagattatcttcattctttaaaaaaatgatgataaatggaagaggtacatttaggcaaatgttgtcctaggatgagatcagtgatacacactcctgtactgcctcaggagaatgctaaattactattattttttctttttttaaaaaatttattttaagttctgggatacatgtgcagaatatacaggtttgttacctgtgtgtaccaaacacatatacatgtgccgtggtggtttgctgcacctatcaactcatcatcatctaggttttaagccccgcatgcatcaggtatttatcctaatgctatccctccccttgccccctaccccgctataggccccggcgtgtgatgtttccctccctgcgtccttgtgttctcattgttcacctcccacttaggagtgagaatatgtggtgtttggttttctgttcctatgtaagtttgctgagagtgatggtttccagcttcatccatgtcccagcaaaggacatgaactcagagaaggctaaattattattacactttaattgcaaaaaggcttgcaataatctaagttaccatcatgcatctacgataattttatcctggagttttgggagatgaattttatgtactatatcagcaagtcgttgaaaaaaacaagctaatgtgggaactctaaccagtggttccataacatcgtcgtgtctaaaattctcccatagtaagtaaaacaatattttgattcgatttggtctttaaaaagtatgtcacatattccttccttctttctcctaattttattagaaaaagcaatatagtatggtagttaagtacataggctttagagccagacaaactcaagttcaggtctaattcagcctcttatttgctgcttctttcttcttggccaggttgctacttaacctctctgaatctcatctgaaaagtgggtataatatttctcatagggtttatgaatggaaagcacttagcacagttgaataaatgacaggcattattattatttgggggaaaagaaggaagggtgaagtgaggagtatcaccaaacaatactgtaaattgtgaattacagctccaaggagattaataaaattatatggatttttaaactgtgataatccatgaaagctcagaagacccacctttccataatgatcccactaaggatttgctgtgaaattcaaagcaaattatctaatgactttaggactcagtttccttatctattttcacagcatgtccatgaccacagatgtgggtcaaaggccagaaggaatttcctgaacgttctgttctttataagacccctcagaccctcagtcagttctgaaattagggtgagggttgggtcattggaaaccccaatagtaagcctgattgaaagcctcaccagccccacaggactggggttcagaaaagcttcaatttaatttagaacaaatagagtgtttacacatctaatgataacaaatttgcactcattcataaacacagacacagtttttttttattttgagacggagtcttgcgctgtctcctgggcaggagtgcagtggcgccatctcggttcactgcaagctccacctcccaggttcaagtgattctcctgcctcagcctcctaagcagctgggattacaggcacccgccaccacgccgggccaatttttttgtatttttagtagagagggggtttcactgtgttggccaggttggtctcgaactcctgacatcgtgatccacctgcctcagcctcccaaagtactgggattacaggtgtgagccactgcacccggccacagatttctcttatattcattatagagccttgaggccttacaggagtaaagaaagatattggtttgttgagtgtacttggtgactcagcttagctgatgtgacatgtgctgaaaagtgaggaagatacttctaaacctaacctggacctttgggcagcaactggtgacaaaaattgacacaggatttacaggaatctaaggaaatacctaaataccattgagatctacctgttattttttacttgaagtacgtgcttttggtgaatagaatacattctctaccccatcagatctctcaccagacatgttaactagtgaccaactgatggactggtggttaattgcctctgtcaacccccagagcagaaaatgctaagaaatagccaagagcaatgtagccagaggaggacaattaagcctttgttttagaaatttgcctgagtagttttcactgggaattagggggactttcttttttccaattagtatccattttgaaatattcaacacagggctgaatactcaaagcaacccctcggattacccaatccttactctcaagtttgttgtgttccaggtgtttcgctgttgccttaatttttaggctcactattctgaataccacattttcgacccaggaagacagtgagaattcactgaacagtgagcaacgcaagcaatttttactaaaagtgaaagagaagtcaagaaagcaccaccagggtgctgttcttttcaaataaaatacacgtgtcaataacagcagtggacaccggggggcagtaacacacaacataggcagccttttttttttctttaaattttataattaaattgcataaattaaataatggttttccaagtttccactttgaaaaaagaatttccccaacagtgtctgctggtcaggagataccacgcagagatacatgactcaaaaggttgtcttctggatcttaatcagaagatctgattctgtttgtgaatccagtaatattgccgttttacatctttgacttgaaattaggacagactatctttttaaattggcttttactattttctctcatctcatggcagaatgaccaaaagctatatatagtttttttttcttgttttgtttctttatttgagatggagtctcactcacgtcgcccaggctggagtgcaatggcgggatatcggctcactgcaatctccgcctcccgggctcaagtgattctcctgctcagcctcctaagtagctgggattacaggcacacaccaccacacccagctaatttttgtatttttagtagagacgaggtttcaccatgtgatccaggctggtgtcacatataatttcctatattcacgtttgtaagtcagcccttcctagtttgagaggacagactaggccctggggttgtgtgcagtctttccctggccatggtgatgggctggagtgcaggggccgggggatggagcttctgcttaacaatggttttagggccgcggtcatcttgaggcaggtgtggcaaaggcaccctggagaggagaggtgaagagacctggaggcgccaggggtttgagaacagatggagagcaggtgaccctggagctcaccttcctcggggcagggacaagaggaaggccacatgtgcccctgtgcagagccagctcccgtgggacacacaaaggcatccacaccctaggagtttcagcttttctcaagtaccacctccagcctcatcactctgccagctgctcctgcttaacttgtcagactctagggacctatggcaagaagatcactggaccaaccaggaaaggaaaatactaaggcttcaaacttttggaaagctactggccatacttttatggagcacagaagaaaaacaaatcctcaagtatctgatgctgtttagaaataagtataaactgcagttcatccttaaaaatagctaaataataacagctgactgtatatagtgctgaagggggttggccacggttctaaagtcatttaattcttataaagaccccatggagcatgtgccataattatcccagttggggaatctgtggtgcacagaggctaaatgactcagctaaggacgcttgagcttttaagaattggaggtgggatttgaactcaggcaatctggtaccggaggctacactctgaaccattacgctctgatgctggcaaaatgagaaatgcaaagtttcctcctgtaaatgaaagcaaagcaaacccttactctgaatttctgtaactggatttggagttaagttacttgaatacatatatgataaattgtctgaatgaaaaatgctgttttacatggatacctaactcatttaaaacttataatgggatttttgcctttaattattctaattccacttcctggttacagatacttaaaaaaaaaaaaaaaaaaaaagcttttttacccctctactggaaatcaagcatccctagagagaaatagcgtctttttcatgaccttttttagcacttggcatatttatcatggggtctaactcagagaaggtattccataaatatttattagctgcttgtacagctttaataactattgttgcttcaataaatattcattatgggtgaaaagtacatctgccaggagctcttgttttactatatatcataataggaaaataaatttatgagtttctaaaagatggaaaaatttatgagctaaaatatatcttaatcactaatgtatttttaagaatctttgatagtttcttaaattgttaatgcatccaagaggagagggagaagtggtgaaattatgtaaataacaaattcaggattcttaagagaagacgggtaagattatatgatagacaataggctaggcatttttataattactttttttagcttctcagaaatgctaaaaggctattatattgttcccattttccagatgaggaagctgagagttagggaagtaacttcctttccaactagtcaggatttgaatatgtctggtttcaaaatccacaccctttctattatacattatatcaatcaagaattcattctatagcaatagaacttgttgatggtggtttaaaactgtgggatttattttctcacatgaaaggtagtgtggagacacctgggcgttggcaatggcccagtgtctgggtgatgtcagggcaatgatactgtgatgttctcagcctttcctcacggttgcaagactcaagggaggaagatgagaaggggaagtaggccctcaaatccaaaaactttcttaggaacctcacagcagatttcatttatatcccattgtccataacagagttaaggaggaggatgataaagagttggacaagccaatgatcagtgtctacacaatcaggttgtgatgtttgatagtagattcttttgatgttgtctctgtagggtaattgttaaatgatcaagcagttcctctgagctcatctccagcgggtacattctgggtcagaagaactgagttttcaagtgcatctcgggtatctggtcacttttgcttctgccaacatagtcttgtccagtgtcagagagaggacatgctgttaagtgctgccacttttcatgtacttcctacaagtaccatgtctgtagctctgtgctgtaaaactggggcactgggtttttctactttctgatttttgggtttcaaatagaaagagcatcagacaaggagtcagaaggctcggattcgagtccagctttgttacccgtgaagtgacctgaaataaatcccttaagccccatggacttttatctttttcatcttcacagggtggtgataatattcttggctgtttgtcagggttgcagaatgtactagtaagcactctgaaatcaccgaggtcttatataaatgaacgtgtcattaccgttattaggtccaaaggggccctctggatccaagcactgcagtgactatcttggatcttgaggctgtaagatctcaaagtctggagcctctgtcatccttatttccatttcctgaaaactagcacaatgcctgcacttagtggcaacttattaaatgcttattcaatgagggagtgagtaggtgaatgactgtatgcatttttaaaaatgaatgaagcccaatcctatgacaactgaattctggccctttggctcttcctgtgctcttgcatgtctatctgcctgctggaggtactgcctgaatggccttcgcacagcatccaaaagtgattttacctccaaggtacggtagctcttatcttctgctcaaagctgtaggacttcctattcctgccaccagcatctctcttctccagtccctgggcatgcagttccagatttatatttgtctctttgtttcctctcattctcaacatcctatcatttggcaagcctctgaacagtattgtacttctgcaatattcaggtgtgagacagacttcagccaccacgcagtattgcaaagagctgctcctgattgtgagaccctctcttctttcataaggtattgatgcagctgtggcaaagtctgactttggtcacagggatggcttagtcgggcccttgctctgaggcagagactgggctggatgctctcggagagtcctagcctgtcttagggaccctgcctgtgtggatgtgatccttcatgatcaggcattgccagcagcagacttgagtctacattttctcaactaaagagccatgggttagacaatgataccatgtgttcagataaggcactgaagaattatatgctcagtttggattggggattccttttcactttcaccgtttgtaaaataatcatctttattaagatttaattcacataccattgaatccacttatttaaaatggataattcagacttttagctgttcacaatattgtacaaccatcactacaataaattttagaacacttaaatcactttaccccctcccaccgaaaaaaaaaaaatccttacccattagcagtcattccccctttctcttcctgttccccagcacccctgcccctagccctaggaaaccactaatctactttcggtctctatgtattcatcttctctggacatgtaatataaatggaattttatcctatgtgtttttttgtgactggcttctttcacctggcgtgatgttttcaaggttcgtccttgttgtggcatgtattactaattcattccttttgatgctgaataatattccattgtatggacatgtcgcattttattttatccattcgtcattgatggatatttgtgttgtttctgttttgcgtcaatgatgaataataatgctgctttaaccattggtgtataaatttcatgtggatatgtttttatttctcttgggtagatatctatgagtagaactgctggatcatatagtaattctatgttcaaccttttgatgaatggtcagactgttttccattgcagatgtaccatagtgtaactgtttttaactcggggacagttttagcatcagaatagagaagggcatttaaagtgagagtgataagtggctaagattttaacatgtcaaaagaaacacaatgttattttactttaaagtactgtgcatttataatttgtgtccaagtctctattagcaaatcttccaggagacaggattgcattctgccatctggcttgtccatggcagaggtaacatacctggttaaatattcttgcctttaaagtcaccttcactggaaagtggtcttgaaccagagtctttctctgccaccccttgtgccccttgtcaggtatgttcagcctcagcctagcggctggtgcggtgcttgtgtatcattccattcctggagtccatgcttagcaaaatcttttgcccatggatctttttctatagtgggtgactatggtagagaattatattacagaggcaacatcgtgatctgccagtagaatgcgacagagaaagagagagaggaagagaaagagcgttgctaggaatagggcattatccccacagtagttaaggagggtggaggagaagaaaaatctgttttcatgacttcaagattttagatggtatgttctagaattctgaatacataaaatgtaaatgctataactctgggtttaattctgttggcttgccttcataatttaagaaaataatatggaaagataagacagaaaaatatatcattgtcagctgagtgtaaccctttttagactatatatctcacctctgatatactgaaattacatgaatttcttattttagcaaagaggagagaaagtgtttttctagcagatttaaatgtctctttaaaatagtactggtagtcactccctatctatttcttctttaaaagagttaggattcaatggacacagttttaggaaactagtaagttttaaaacatacagaatgttagaagtagaggagagatagctaaggaaattgaagcccagataaattaaacatggtgctcaaagtctcccggtcagcggcagctctggaaccacagccagagcattgaccctcaggctggggctccttacctgtacacactgcctcagtctgccctggctttcctgcacatggagggcagcaaggaaggagcctgctagctgggcacacctgagctcttgtgcccacacgtgctgggactcagtggcagccattaatagtacacagtggtggggtaagaagtcctagctctcatatctgatcctcactcttggcaactactgtgacaaacaatgccactgtgtgaattataacaacccaacattcctgagcatggttaagcccctcaccagggcttgagagtggcccataggcacaagctcagccccacttgtacctttacctgggaggtctcctgcagggcctaacccacacaatcttgtaggatgatcccattactcttcaaagcagatcactttcctcatccacaaaatgaccaatcacatcaaccacatgaataataagactcctctagtaaggatttgtgatgattgaatgagaccatgtcggtaaaagtgctctgtaaatcagaaaagatcaccaaaaaataattgtcataaatatttgtggaggcacacacacaggcacgcgtgtacacacacacacgcaaacacacggcttttatcatttttaaatacttagaaaagtttttcaagtcctttaacctagtaaatgggccttcgtaaccagagaaaatgcccttggttcttggtaccagagagaatctcagcagatatcttagcaaaacataaagaacaaaatgaagggtattccctgagctagcgtttctcaaacttggctgcatattagaatagcttggagaattttaagagtgcccaggtcttaccccagaaattctgattcatttatttggtagatttagggagtggggagaggcaaccatttatagttttaagctcctaggtgacagtaatgcacatccagcatggagagaaacgattttatgccaccatcccttaatcatcttccttcctagttccttcccaggctttgtgaggccagacaatattgcagtcgacagtcaagctcaggtgtcctctgatgttgctggaagcccagtggcctgatctgacaaacttagacccacaatcaaataaggagccaggggccactttggatcctaaccatccatatctgaagagatcattgaagtgactgtattcgtttgctagggctgccataacaaaatccgacagactgagtggcttaaaccacagaaacttatcttcccacagttctggaggctgaatgtccaagatcaggtttcttctgaggcccctctccttgccttgcagatagctaccctcttgctgcttcttcacatggtcagccctctgggctcacacaccctaggcatctctttttctatgtccaaattttcttgctttctttttttttttttttgagatgaggtcttgctctgtagcccaggctggagtgcagtcatgtgatctcagctcactgcaacatctgcctcccaggctcaagtgattctcctgcctcagcctcctgagtagctgggactacatgtgcaccaccaagccaagctaatatttgtatttttagtagagacagggtttcaccatgttgcccaggctggtctcgaacaactggcctcaagagatccacccaccctggcttctgaaagtgctgggattacaggcaagagccaccacatccagcccaaattttctcttcctataagaatatcacctaacaacctaattttaacttaattacctcttcaagggtaattaagttaattaattaacttacagtcacatgcaaagatactggaggttaggacttcagtatacgaatttgagggggaaacatttagcacataacagtggcctcaataaagaaactgatggtgtatctgggacaagggaaccccatgttggccccctgcagttacatccgggctgggatcaaaaaaaatgcactcagggaggagccaagatggccgaataggaacagctccggtctacaggtcccagcgtgagctacgcagaagacgggtgatttctgcatttccatctgaggtaccgggttcatctcactagggagtgccagacagtgggcgcaggtcagtgggtgagcgcaccgtgcgtgagccgaagcagggcgagacattgcctcactcgggaagcgcaaggggtcagggagttccctttcctagtcaaagaaaggggcgacagacagcacctggaaaatcgggtcactcccacctgaatactgggcttttccaatgggcttaaaaaacggcgcaccaggagattatatcccgcacctggctcggagggtcctacgcccacggagtctcactgattgctagcacagcagtctgagatcaaactgcaaggcggcagtgagcctgggggaggggcgcctgccattgcccaggcttacttaggtaaacaaagcagccaggaagctcgaactgggtgaagcccaccacagctcaaggaggcctgcctgcctctgtaggctccacctctgggggcagggcacagacaaacaaaaagacagcagtaacctctgcagacttaaatgtccctgtctgacagctttgaagagagcagtggttctcccagcacgcagctggagatctgagaacgggcagactgcctcctcaagtgggtccctgacccctgacccccaagcagcctaactgggaggcatctcccagcaggggcagactgacacctcacacggccaggtactccaacagacctgcagctgagggtcctgtctgttagaaggaaaactaacaaacagaaaggacatccacaccgaaaacccatctgtacatcaccatcatcaaagaccaaaagtagataaaaccacaaagatggggaaaaaacagagcaaaaaaactggaaactctaaaaagcagagcgcctctcctcctccaaaggaacacagttcttcaccagcaacggaacaaagctggttggagaatgactttgacgagctgagagaaaaggcttcagacgatcaaattactccgagctacgagaggaaattcagaacaaaggcaaagaagttgaaaagtttgaaaaaaatttagaagaacgtataactagaataaccaatacagagaagtgcttaaaggagctgatggagctgaaaaccaaggctcgagaactacgtgaagaatgcagaagcctcagcagccgatgcgatcaactggaagaaagggtatcagcgatggaagataaaatgaatgaaatgaagcgagaagggaagtttagagaaaaaagaataaagagaaatgaacaaagccaccaagaaatatgggactatgtgaaaagaccaaatctatgtctgattggtgtacgtgaaagtgatggggagaatagaaccaagttggaaaacactctgcaggatattatccaggagaacttccccaatctagcaaggcaggccaacattcaaattcaggaaatacagagaacgtcacagagatactcctcgagaagagcacctccaagacacataattgtcagattcacaaaagttgaaatgaaggaaaaaatgttaagggccgaaagagagaaaggttggtttaccctcaaagggaagcccatcagactaacagcagatatctcggcagaaattctacaagccagaagagagtgggggccaatcttcaacattcttaaagaaaagaattttcaacccagaatttcatatccagccaaactaagcttcataagtgaaggagaaataaaatactttacagacaagcaaatgctgagagattttgtcaccaccaggcctgccctaaaagagctcctgaaggaagtgctaaacatggaaaggaacaaccagtaccagccgctgcaaaatcatgccaaaatgtaaagaccatcgagactaggaagaaactgcatcaactaacgagcaaaataaccagctaacatcataatgacaggatcaaattcacacatagcaatattaactttaaatgtaaatggactaaatgctccaattaaaagacacagactggcaaattggataaagagtcaagacccatcagtgtgctatattcaggaaacccatctcacgtgcagagacacacataggctcaaaataaaaggatggaggaagatctaccaagcaaatggaaaacaaaaaaaggcaggggttgcaatcctagtctctgataaaacagactttaaaccaacaaagatcaaaagagaaaaagaaggccattacttaacggtaaagggatcaattcagcaagaagagctaactatcctaaatatatatgcacccaatacaggagcacccagattcataaagcaagtcctgagtgacctacaaagagacttagactcccacacattaataatgggagactttaacaccccactgtcaacattagacagatcaacgagacagaaagtcaacaaggatacccaggaattgaactcagctctgcaccaagcggacctaatagacatctacagaactctccaccccaaatcaacagaatatacatttttttcagcaccacaccacacctataccaaaattgaccacatacttgcaagtaaagctctcctcagcaaatgtaaaagaacagaaattataacaaactatctctcagaccacagtgcaatcaaactagaactcaggattaagaatctcactcaaaacctgtcaactgcatggaaactgaacaacctgctcctgaatgactactgggtacataacgaaataaggcagaaataaagatgttctttgaaaccaatgagaacaaagacacaacataccagaatctctgggacacattcaaagcagtgtgtagagggaaatttatagcactaaatgcccacaagagaaagtaggaaagatccaaaattgacaccctaacatcacaattaaaagaactagaaaagcaagagcaaacacattcaaaagctagcagaaggcaagaaataactaaaatcagagcagaactgaaggaaacagagacacaaaaaacccttcaaaaaattaacgaatccaggagctggttttttgaaaggatcaacaaaactgatagaccactaacaagactaataaagaaaaaaagagagaagaatcaaatagacgcaataaaaaatgataaaggggatatcaccaccgatcccacagaaatacaaactaccatcagagaatactacaaacacctctacacaaataaactagaaaatctagaagaaatggatacattcctcgacacatacactctcccaagactaaaccaggaagaagttgaatctctgaatagaccaataacaggagctgaaattgtgtcaataatcaatagcttaccaaccaaaaagagtccaggaccagatggattcacagccgaattctaccagaggtacaaggaggaactggtaccattccttctgaaactattccaatcaatagaaaaagagggaatcctccctaactcatttgatgaggccagcatcatcctgataccaaagccgggcagagacacaaccaaaaaagagaattttagaccaatatccttgatgaacattgatgcaaaaatcctcaataaaatactggcaaaccgaatacagcagcacatcaaaaagcttatccaccatgatcaagtgggcttcatccctgggatgcaaggctggttcaatatacgcaaatcaataaatgtaatccagcatataaacagaaccaaagacaaaaaccacatgattatctcaatagatgcagaaaagtcctttgacaaaattcaacaacgcttcatgctaaaaactctcaataaatcaggtattcatgggacgtatctcaaaatagtaagagctatctatgacaaacccacagccaatatcataccgaatgggcaaaaactggaagcattccctttgaaaactggcacaagacagggatgccctctctcactactcctattcaacatagtgttggaagttctggccagggcaattaggcaggagaaggaaataaagggtattcaattaggaaaagaggaagtcaaattgtccctgtttgcagacgacatgattgtatatctagaaaaccccattgtctcagcccaaaatctccttaagctgataagcaacttcagcaaagtcttaggatacaaaatcaatgtacaaaaatcacaagcattcttatacaccaacaacagacaaacagagagccaaatcatgagtgaactcccattcacaattgcttcaaagagaagaaaatacctaggaatccaacttactagggatgtgaaggacctcttcaaggagaactacaaaccactgctcaaggaaataaaagaggatacaaacaaatggaagaacattccctgctcatgggtaggaagaatcaatatcgtgaaaatggccatactgcccaaggtaatttacagattcaatgccagccccatcaagctaccaatgcctttcttcacagaattggaaaaaactactttaaagttcatatggaaccaaaaaagagcccgcatcgccaagtcaatcctaagccaaaagaacaaagctggaggcatcacgctacctgacttcaaactatactacaaggctacagtaaccaaaacaacatggtactggtaccaaaacagagatatagatcaatggaacagaacagagccctcagaaataacgccgcatatctacaactatctgatctttgacaaacctgagaaaaacaagcaatggggaaaggattccctatttaataaatggtgctgggaaacctggctagccatatgtagaaagctgaaactggatcccttccttacaccttatacaaaaatcaattcaagatggattaaagacttaaacgttagacctaaaaccataaaaaccctagaagaaaacctaggcattaccattcaggacataggcatgggcaaggacttcatgtctaaaacaccaaaagcaatggcaacaaaagacaaaattgacaaatgggatctaattaaactaaagagcttctgcgctgcaaaagaaactaccatcagagtgaacaggcaacctacaaaatgggagaaaattttcacaacctactcatctgacaaagggctaatatccagaatctacaatgaactccaacaaatttacaagaaaaaaacaaccccatcaaaaagtgggcgaaggacatgggcagacacttctcaaaagaagacatttatgcagccaaaaaacacatgaaaaaatgctcaccatcactggccatcagagaaatgcaaatcaaaactacaatgagataccatctcacaccagttagaatggcaatcattaaaaagtcaggaaacaacaggtgctggagaggatgtggagaaataggaacacttttacactgttggtgggactgtaaactagttcaaccattgtggaagtcagtgtggcgattcctcagggatctagaactggaaataccatttgacccagccatcccattactgggtatataaacccgaaggactataaatcatgctgctataaagacacatgcacatgtatgtttattgcagcattatccacaatagcaaagacttggaaccaacccaaatgtccaatgatagactggattaagaaaatgtggcacatatacaccatgggatactatgcagccataaaaaatgatgagttcatgtcctttgtagggccatggatgaaattggaaatcattctcagtaaactatcacaagaacaaaaaaccaaacaccgcatattctcactcataggtgggaattgaacaatgagaacacatggacacaggaaggggaacatcacaccctggggactgttgtggggtggggggaggggggagggatagcattgggagatacacctaatgctagatgatgagttagtgggtgcagtgcaccagcatggcacatgtatacatacgtaactaacctgcacattgtgcacatgtaccctaaaacttaaagtatattaaaaaaaaaaagttatatgctcagggagaccattaaagtctaacaagctcctgtattctttgaggaacctaatatttcttttgggagaagtaagtattctttcattttaaaagtattacatgtccattttaaaatgttttggtggttggtgtttttaacttttgttttggcaaatgattaagaggaaaagtcaacgcttgtttttggtatgagagcaaataagttctttcaaacactaagaccagaacctaatgtttgcagtatgcgcttttgatcatggcaaagtttagagttagaggcatcatgccccctgaactgccattcttagatgaattctaggaactaataacaagagagtatactactagtaggactcacctggtcaccttgagacaggatccattgtgagttcttgggtctatagagagagcctattgccaggaccagtagggggcttaagcttcaagcaactgatatgacattggaaatataagatcagttgtggtagaggggtttaggtgtcaggactaaacttgaggatgccccaccccttcggagtccagaatcaaactatcagggaacaaaacctggccctgcctcttactctctgtatggcctcaggaaacttgcattaatacctgtatgcttcagtttcctcatatgtaaaatttagacaatagtactgcctcatagaattgttttgaggatagtcataatatttcataagattaatgtgagtaaacagaaatacaaacaatcatcagagaatactataaacacctctatgcaaataaactagaaaatctagaagaagtggataaattcgtggacacatacaccctctcaagactgaaccatgaagaagttgaatccctgaatagaccaataacaagttctgaaaccgtggcagtaataaatagcctgccaacaaaaaaagcccaggatcagatggatttatggctgaattctaccagaggttcaaagaggagctgttaccatttcttctgaaactattccaatcaacttaaaaggagggactcctccctaactcattttatgaagctagcatcatcctgataccaaaacctggtagagatacaacaataaaagaaaatttcaggccaatatttttgatgaatatcaatacaaatatcctcagtaaaatacgggcaaaccgaatccagcagcacatcaaaaagtgtatccaccacgatcaagttggcttcatccccaagatgcaaggccggtttaacatacacaaatcaataaatgtaattcttcatgtaaacagaactaaagacaaaacccacatgattatctcaatagatgcagaaaaggccttcaataaaattcaacagccctttatgttaaaaactctcaataaactaggtattgatagaacatacctaaaaataataagagccatttatgacaaacccacagccaatatcacactaaacggcaaaagctgggagcattactcttgcaaaccagcacaagaggtgcactctcttaccattcctattcaacataatattgaaagttctgacctgggcaatcaagcaagagaaagaaataaagcgtattcacataggaagagagaaagttaaactgtctctgtttgcagattacatgattctatatctagacaaccccatcatctcagcccaaaagcttcttaagcagataagcaacttcagcaaagtctcaggatacaaaatcaatatgcaaaaatcacaagcattgctatacaccaacaatagacaagcaaagagccaaatcatgaatgaactcctgttgagaattgctacagagaataaaatacctaggaatacagctaacaagggatgtgaaggacctcttcaaggagaactacaaaccactgctcaaggaaataagaaaggacaaaaacaaatgaaaaatattccatgctcatggataggaagaatcaatatcatgaaaatggccatccttcccaaagtaattgatagattctatgatattcccattaaactaccattgacattcttcacagatttagaaaaaaaagtattttaaaattcatgtggaaccaaaaaagaacctgtatagccaagacaaccctaagcaaaaggaacaaagctggaggcaccatgctacctgacttcaaactatactacaaagctatagtaatcaaagcagcatggtactagtaccaaaacagatatatagaccaatgaaacagaacagaggcctcagaaataacaccacacatctacaaccatctgatctttgacaaagctgataaaaccaagcaatggggaaaggattccctacttaataaatggtgctgggagagctggctggtcatctgtagaaaattgaaactgggccccttccttatacattgtacaaaaattatcccaagatagattaaaaccttaattgtaaaacccaaaactatgaaaaccttagaagaaacctagaagaaaatctaggcaataccattcaggacataggcatgggcaaagatttcatgactaaaacatcaaaggcaattgcaacaaaagcaaaattgacaaatgggacctaactaaactaaagagcttctacacagcaaagaaactatcatcagagtgaacagacaacctacagaatgggagaaaatttttgcaatctatccatctgataaaggtctaatatccagaatctacaaggcactaaaccaatttacaagaaaaaaaagcaaacaaccccatcaaaaagtaggcaaaggacataaacagacatttctcaaaagaatacatttatgtggccaacaaacatatgaagaaaaactcaacatcactgatcattagagaaatgcaaatcaaaaccacagtgagataccatcagaccaatcagaatggagattattaaaaagtcaagaaacaacagatgctggtgaggctgtggagaaatagaaatgcttttacactgttagtgggaatgtaaattagtttaaccattatggaagatagtgtggtgattcctctaaggcctagaacctgaaataccatttgacccagcaatctcatcattggatatatgcccaaaggaatagaaaccactctattataaagattcatgcatgcttacatttattgcagcactattcacaatagcaaagacatggaatcaacccaaatgcccatcagtgatagacgggataaataaaatgtggtacgtctacatcatggaatactatgcagccataaaaagaaatgagatcatgtcctttgcagggacatggatgcagccattatcctcaacaaactaacacaagaacagaaaaccaaacactgaatgttctaacttgtaagtgggagctaaacaatgagaacacatggacacagggaggtgaacaacacacaagtagggtctgttaggggaggggtcagggggaagggagagcatcaggaagaacagctaatgtatgctggacttaatacttaggtgatgggctgataagtgcagcaaaccaccattgcacacatttacctatgcaacaaacctgcacatcctacacatgtatcctggaacttaaaataaaatacagattaatgtgagtaaaatgcttagcacagtgcttggcatgttagaaatgcttgataaatattattatttttataattagtaggcaaaatgctttataataacttcattctagttcaggagtgctgtgaaaattatttataagaatgagctgatgttatttaacatacgacctataaaatagagcagaagttcacctctgtaatctacctaaatattcacacagaagagcattagctaaaacatttgaacatgagttagctgggagttgagatggtgaatcattctccccagtgatctgtaatgatcgctaagaaccacctctaaaggctggaggcctagggtacttacaagacaggtggggagatcctatactcagaaagagaggatggatccccaccagggtagagggtttaacacctggacccaagagtcacagcagtttacccatcatgactacagccagattccctgcctgtaaactgagcaactgtagggctttaaatcattctctcaacaagtatttaatgagcacttactattttccagtggggatatgatagttagctcaaacccctgggcccagtcttcatggagctcacagtctatgggtccatccttggaaaacttcaagttaagcaagagcagtgagagtttcctatcctcctcccgttaaaataactttttacctccagggaaatgatctttttacaaaaatatgccccaactctctggttttgtctttagtttacttttaaataaacttggatcatggaatgaaagataaggaaacttaataggctgttgaagcgaaaaccctcagaagaggttgtttcaaccagactttcctttctgataaatcactggagctgcctaaactgaatcccatcaatcctctgttctctgctagccctttgtcttagcccacttgggctgctataacaggaatggcatacactgcgtggcttataaacaatagaaatttattgctcactgttctgagggctgggaagtccaaaattaaggcacctgaagttgctgtgtctggtgagggcatgctttctgcttcatagatcgcaccttctaacaatgtcctcacagggtggaaggggctagctttttgggttctcttataaaggcaatcatctcattcacgagggtggagcctcatgacctaaacccctcccaaaagctctcatcttgtaatactgtcacattggggatcaggtttcaacttaggaattttggaggaacataaacattcggatcataacatccttcgtttcccacattcttggcaatttcttccctggctcattgccaactgccctactgtccctgactacctgtgacggttaattttaggtgtcaatttgactggactaaaggatgcacagatagctgataaaacattaattctgggtgtgtctgtgagggggtttctggaagaaattagcgtttaactcagtagactgagtaaagcagatcacccccaccagtgggagtgggcatcctgcaatccattgagggcctaaatactaatagaagaaaaaggcaaaggaggggcgaattcactttctctgttggagctgggacatccatcttctcctgccctcagatatcagaacccctggttctcagacctttggacctgaactgaattataccactggcttttctagttctccagcttgcagagagcagatcatgatacttagcctccataatcacataggaaaattcctataaataataaacgtgtgtgtgtgtgtgtttgtacgcgtgcgcatgtgtatgtgtgtgtatatgatggtttctttggagaatcctattactcaagactgccttttcttcatcaaatatgttgatgcaggtaggatgaagtgtcagcaaatgagcatattctaatttactctttcactttaaaaaacaaaaccagataatcatggcaagaaaccctccttgaccctctgcatttctgccttatttctctattttcatccacagtcaaaattctcaggagttgtctgcataccctgtcttcagttttgcatgactcattcacccttcaacctcctccaacctggcttctactccctcagctccacccacgacatttgctgaagccataaattaccttcaggtaatcaaataaggtcatttggtatttttctttttaatgaaatataatgaacgcataggacagtacaaaaagcataagcatacagcttgatgatgtttttgaaagtgatcacatccattggaccatcactaagggcaagaagtaggacattttcagcaccttataaacatccatatgcccctccctaaggtcactgctattctgacctatcaacatatccttatttcctgtttttgaactttatagaaatgagaatttatagtatgtgcttttttgtgtgtttggctttttacactcagcattatatttgggatattcaggatttagtcttataaactatgaatatacaaatataccgcgatttattaatacaaatttactcttgacaaatttgattgttttctgtttttggctattatgaatattgttgcaatgaacatccttatgcatgctttttatgtacatatatatgcatttctgttagttatataactgtgagtagaattgctgggtcttaaagaatgtagatggaggatgctagttttcaaagtgattgtaccagtttacactcttaccagcaatatgtaagagttccaattgctggccaggcgtggtggctcacgcgtgtaatccctgcactttgggaggccgaggtgggcggatcacgaggtcaggagacagagaccattctggctaacacggtgaaaccccggctctactaaaaatacaaaaaaatcagccaggcgtggtggtgggcgcctgtagtcccagctactcgggaggctgaggcaggagaatggcgtgaacccaggaggcggagcttgcagtgagccgagatcacgccactgcacttcagcctgggcaataaagcaagactccgtctcaaaaaaaaaaaaaaaaaaaaaaaaaaagagttccaattgctacagattctcatgaacatgttatttttacactttttaattttgccattctgtaatttttagtggtatctaattgtatttttattcctctaataaatactaaggttgagcaacctttcaaaaacttatgaaccatttgtatatgttcataattgatgtgcccattcaagtctttcgcccatttttaaaagctttattgagatataattgatatacaaaatttgtacgtatttaatatatacttttcaattagtttggacaaatgcatacatccatgatatcaccacaacaaggtactactagaccgtatatctatgatatcaccacaatcaaggtactagatatatccatcacctctaaaaatttctgtatgttcgtgtgtgtgtgtgtgtattaagaacacataacatgacatctattcttttaacgtattttaaagtgtgcaatactgtactgttaactgtaggtactatattgtacagcagataataagttctagagaacttattatcttgcatattttaaattttgtctattttttgaaattgggatttacatgcttttctcatttatttttaagatattttacattttctgaatatggccttccttagtatatgaatttcaaaatcttcaactttgtggctgtcttttctgtgaataatctcttttaatgtatatgttatgtctctctgtttaaatcttcaatttttctcagcagtattgatagctttattttggagttttttgcacatcttttattagatttattcctgtgcatttgatggttgttgatgatagtaaacacaacgtctttttttcttttagaatttcgctgtttattgctggtgtataaaactaagattatttttatctattaacttttcatcacccgtattcctaaatttacttattaattccaacgaacattaatttatctgaaggttattttttgtttcctaggtatacaataattttatatgtaaaaaattaaagtttcatttcatattttccaatctttattaccctttatatttttatcttgccttttgtattggccagcagtacctccaataaaattttaaataaatgttgtaacagcagaaattcttgtcttattctcattctcaaggaaaacatttttaataactgatatttgctttgtaatttctgttgatatagtttatcagatttaaaagttgtgtcctattcatagttagctaataatttcttgtttctaataattttccatcataaatgttaaaccctatttttctgtattcattaaaacaattattttttcacctttttgtctcttaatatggttaattgattttttttaatgttaaaccaacctcgtttcctagaacaaacccaatttggtggtcatatattattctttttatttattgctagattttatttgttaatatattgtttaggactttttgcatctatgttcatgagagaaatgaaactgtaatttccccttcttaccaggttttgacattcaggtcatcccagtctcataacacttgttgggaaatgtctccccaaccccctaattgtatttatgcatgtatttatttgttcatttagagacagagtctcactctgtcatgcagactggagtgtagtgggcgtgatcatggctcactgcagcctcaatctccctggcccaagtgatcatcccccattagcctcctgagtagctgggaccacaggcacatgccaccatgcctggctaatttaatttcccttcccttcccttccctcctaatttactcccttctcctctcctcccttcccctctcctcccttccattcccctcccctttctctctctctttctttctctcttcctctttctttcttttttctttctctttctttctctcttcctctttctctctctctctctttccttccttctttctttccttctttctttccttccttccttccttctctctctctttccttccttccttccttccttctttctttctttctttctttctttctctttctctctttctttctttctctctctctccttccttcctttctttctttctttctttctttctttctttctttctttctttctttctttctttctttctttctttctttcttctttctttctttagatacagggtctcactatgttacccaggctggtctggaactcctgagctcaagtgatcttcccgccttggtctcccaaagtgctggcattacagtcatgagttagtgcagccaggcctcttgattaaaaaaaaaattaaaattcagaaaaatttgtgtaagatcttttggaatagcttaccagtgatactatagaaacttgaagttttctcagagagaagattttaaccaaagattcaatttccttaaaagatatagtactcttcatatcattagtcaatggtgaaatgtgggatgtaatgacttcatcaggttagagtttagaaattcactctggtctcattgcagaggatagattgaaggcagacaataatggacagaggccagtcaggaaactgacaatagttactcgttgacatcagtactaagcaatggcagagagttgaagaagcgggaacaggtgaaagtaaatacttatatattttttaaagaaatgacttagaaaagacagtagtaaggcaaggatggtttattttaaaagtctgagtttactgtgtattttctttacttttataaacagaatcagagagctggtaccattttagtaggttcgtggcctgcctgaaaactatgaccttggagcatcatttactcaaaatgctaatccaaaaacaggacatcaaaactagtcatccttcacctcatggaaatgaataccccaaggtaatatggtgttattattattatttcttgattggcatatagatgttgtgagggtggatcttacacccatgctgtatccttcctgtctctcctttccattctgtaggtttcctctggtcactttccacacatcctcatttggcccctgctcatgagcaagttgatttaggagatggtgcctggcagttcctcctctgattatccagggaagacagaaaaagaggaaaacaggagacaagaagtaaagcttagaacagagaggtaaccattaaccagtaagggctaatagatgagtccagagaaaagataacaaaggaggcaaggagagcatggtaagccatggtaggggtgagggaaagatattgaagattgaactccaccagtgtgggataatgtttgtatgtggactgtgttgtgtctcaggttcaggttgtttaagcagcctagtgacccagatggtcccctccttagtgtctggttttgtcaggttgtaacttggctttttcagttccctaatatctcacattatctcctcttcctcctaggccttaatcatgtcttacttttttacctcccaattggttgatattgaattcttattaaataaaaatgtactctttactcttgagttaaaattctgatgggggaagaatgtatacacagaaataatgtcacaactatttatgttaattaaaggaaatacagagcaaggtcaactgagatattccggagaagggagtttccttagggtattgccgcatggacatacgtgctcactgtggcacagaaacacctgcagatttttctttcacgtaagactcagaggcaaagttactgtaatcaagaatatgttgttaagaaggcctggtattaatactgtcattggtaagcattttgtaacttatataaagcagaccttgggttttcaggacacttcatctgctaattgtcaacaaaatacagctgaggttgcaatgtgtcagcaagaatgtcaaggaggaagtcagagggtcaaatcagctggggcttggcccatttaccctaggtggtgttcttaaagactcagtggttcattctgcttggcagcttaaagagccattgaggttcagaactaaaaatgtgtgggccaggaagagggcagtgaatgactgggaccaacttgccagtgtctcccaggggcaccggctcagataactggaagtctggaagctttctcatacgcagccagtcccgtaagcagctcttggcaagactaaaaaaaaaaaaaaaaaaaagaaagaaaaaaagaaaagagcttcccacttgtgtttcttaactgtaactgtgcctaagaatcacgtggtgcttgtcaaagtgcatattcctgagccctactcacaggcacttacacgctcctttcggggttgggcccagagatcagcattttcacaggcacaccaggtattccagaataagatggtctgtggagcacgttttcagaaatgctgccttaaagccttccacgtgtcccagctgtctaatcactgtatgagggtccatgatttaatctattttcaaagacaggggtctggaagtcgtttttctcctcccacattcaatctgtcatctccttctgccactgtgttctaacatttcccttaagtttgggccctctcctcaagctcctcactgaaaagcactgtctaagctggatgcatttcacacgagagcttctgtggttggactgcttaagttaaaccagcctccacgagggtgtccagcagagaggtgcacctgagggattagggcaacaacctaactcgggcctcagttactgcagaattcaatttgccagaggtgccaacgtgaagaccaaaggttgagtcttacacaggtcttcctgttttgtttctttaaaccttgaacgttttgccaatgtttttaaatggggggaatttctcatagacatccagatttctgggtgttcttagaatatcagatctggctagtttggccagtttccctaagggcaacagtcagctgggttgaggagaggctgccctcttgagacgctgtaccagcctccccaagcagaggtacatattgtctgaagataagaaagctaacatgctaaagcctgatctttcaaggcccttgacccaattttgtatttgcaattctgtgttgttttcttaaagaggcctccacaattgtatacatttctgactccaggaaacctggatcttctcctgcagctctgctctatggactccccacactgaggtcaagggtggctgccatttatcataagacttgccagtggattttctttaagtagagaaacatttctctgaactcgtgggtctacagaaacaaacaaaagaaggcctcagatttcatgaataaggggagagatcctatctctttgtggatgtgatctggcctgcatccctggcctttgatttcatgatccctggctgcatcgaggtctccatctacaattcatgattccttaaattctatggagttggaacaacctttttgtgcatagtcctgcttgctttcttctccatttcttaaaagacagatttgaatcccatccatttaatcctcatttggtaaagtgaggctgggaatcaccatggtgaagaaaaagaaaaagtagaatctgcccatagaaagagaatgagttgtacatcttgctcttttggaatgggatgtcctgtgggaaaggactggatcatttctgtaatttttaatgcaactgtttgcaggcataaatgctcactgagagctcaatagatattcactgatgataagacatgtataaaacagattacagcgtatgttcttcagttaccttctagggtgtttttttgtattggtcactgcttgaacagatccttctattccaccatattagagctctgtggaaatacaaatatttttgttgtaacaacatgctgtaatattgggaattcagtcattgccttttccctcccaagatactttttgctttactttgatgtttcttgtgttgttcacaatgctgttttaaagcctcatttttcactctcaagatcgttaaggactcggcgatgttttctgtgaatatatttattactcaggcgccatgtctctgcttctcccctggaaaggaggaaaagtggcatacattatagatcatctggcagggagtcttcccgaatgatttatttgaagcttattttaacattctccatttgtacagactgttagtcttctcttgtttctagataacgtcttattaaaaggaaacacctgtttaaacatgtaaaaataagactaaatctaaacaaaaggagtttttggtgaatatggcatttgccatatatactttctaatttttcctgcgtggaagtgggctgggggatgtgatttattactctggatcagaccgattagctactttttctacaaaataattgggtgaaagccagtgtccaccaggccagtgtggtttatgggtcatggctatagaactaggaagatgttgattattttaaagatatcattaataacataagcctaatttttcagtagttttccatctagttatattttgcctacttaaatgtcaatcgaattttttttttatatttattctggccctctctgtgactgtagcccagtttcgaatcatttctagtcctaagatcatattaagatgattccagacttatgccttcgatgtctgaaagaatcaaccagaaatcctgaaaatcatattacaagaaaggaaaatgataggccaattactcttaggaacttagttgcaaaaatcctaagcaaaatattagtaaatctaatccatcaatacataaaatgtaaatatacaatacaaccaagttgtagttttcccaggaatgcaatgttattcagatatttgaaaatcactcaaccacacaataaaggagaaaaaagtttgactatatcaatagatgcagcgaaaatatttgatgaaattccaccatgttaataataaactcttagcaaactagtagtagatagaaatttcttaaatagaataaaagctaccaagaaaacaggataataaacagagtacttaatgagaaaatattgaaaacatctttctgagattaaaaaaataaaggatgcttgctatttccactgttacagtgctgtaagtcaagaaaaagaaagaaaacattggaaagggaacagtaactgccattcatgcaccccatttgcatactaaatgtttgcattcatagaaatccaaaataatctttagatcaactattacaattagcaaatggatttatcaaggccattgcataaaagctcagtatataaaatatgtttttatatactagctcaaacaaaaatttgaacgtacctaaaagcagagctaacaaaagataaaccagaatgcagcatggagagataaaagggtgaaaaatacaaaggggaagataaaatacctacagaatagagtgaaaaagatctaagctatgagtaattttagtcctagagagaacgtgacagaaacagttctaattgaacagatcatggctaagaaatttccaacactggtgaaagaaatcaagacacagactaaaaagtcctataaactataaataagataaataaaaagagatccatacctatgcatcacaattaaatggctgtaaacaaataacaaagagaaaaatcttaaaagcagccaggaggcggagtgaaggaggaatgaagacaaattatgaaaattagagtgagctgactttgtatgaaaaataatggcagcctgaagataatgagaaaatatctttaaagtactttaaaaaactgccaatctaaaattctgttttcatcctcaaaaaaagcaattgaaatgaagacattttcagatgagcaaaaacagtggatttatcaccagcaaacctattcttacgaaaacaccaaaggatattgtttaggcagaataaaaatgttcacagatggaaggtgggagacctaggaaaaatgaagagcaatagaaggggaaatttatgaatcaatctgcatgaatattggctgtatgaaacaataataaaagcgtcttatagacataagtcagaagttgggtaaatggagttaaattatgctagagtccttgccttgtccaagagaacaatatcaataaacatgacattctaatcagttaaaaatatgttttgcaatatcaagggtaattattaaaagaatagaaaaggatttatttgtaactttgaacctaatattagaaaaaatgaaataataaacattgagtccatctaaaacacgttaagaaaatcaaggaaaagaaacataaatcaggtagagcaaaaaaaatacacagtaagattatagtcttagacacgagtacattagtaattaaataaatataaatagactaaatgcttcaattaaagaaaaagcatttcagaatggattgaagagattttatgaggtttgtaaaagacatactgaaaatataagaatcatagaaaggtggaaatgcaaaaattaaacaaaataaagctaaacacacagaacatttacagaagttcaccatatgctggtccctgaagcaaatctctagtatcaaaagattcaaattaaacatagtattttctagatccacaatgcaattaagctagaaatcaattacaaagagatatctacaaaattttcatatacatggaaattaagcaatattcttttatgtaactcacaggtcaaagcagaaatcataaaagaaattagaaaatactttgaacagaaaaattatttcttcttaaaacctgtgggatattgctcaaactatgcttagaaagaagtttataactttagatgtgatggaagtctgaaatatcaatttgctaaccatttatttcaagaagttagtaaataatatcaagtcaaatttaaagtaaaaggaaggaaataataaagataagagaaattaatgatatagaaaacaaataaaaaaatagagaaaatcaataagccaaatattgcctatctgaagaaactaataaatctgagaaacacctgctgaaactgagcaagaaaaggaaagagaagtaaaaaataatcaatgtcaggaatgaagagagcaacatcattatagacattaaaaatatgaaaatataattaactttatgccaatatatttgaaaatttagacaaaatttagaaattccttgaaaatagaacagatatgatataaggggaaataaaatagttctgcaactagtgaagatagtaaatctataaattaaaaatctacctcattgcagtgagctgagattgcaccaccacactccagcctaggtgacagagtaagactccatctcaaaaaaacaaagacaaaaacaaagtgtacctcaaagaaaattttgggccttgatgccattagtactgaattctaccattcattttaggaagaactaacactgatattatgtgaactcttacagggaacaagacaagaaaaaacacttccaacacaatttatgaatccagtataatttagataccaaaacctataaagacacaatgaaaaaggaaaattataggtcagtctcaatctttacattttaatttgttttagagacatggtctcattctgtcactcaggctggagcggtgtggtctattcccactcactgcaacctcaaactcctgggcttaagcaatcctcccgcctcaaccttctcagtacctgggatacaggcacatgccaccatgcctgtacaaaaaattgtctctacaattttttgtagagacagggacttgctttgttgcccaggatggtctcaaactcctagcttcaagcactgttcctgcctcagcctcccaaattgctgggagtcatcatgcccaggctaggccagtctcatccttcaacaaagacaaatagactaatggagcagagaaaaattccctgtgacatatgtaactgataaaggagttgattctggactgtatctagattgtctacaaatcaacaggaaaagacaacccaataggaatatgggcaatagatttgaatggctccttcgcaatagaggattttcaaatggtcagtaaaagtatgaaaagatacctacacattcatcaacaagcagaggaatacaaaattaaatcataatgagatacgactacacacctgctagcatggccaatcaaaaagactgacaataccaagttccagtgaggatatggaagagtcaaacactggttgatgaaagtgtaaataagggcagccattttgtaaaactgacattatatcctggcacttggcattatatcctgaagttgaacgtacactatcctgtgactgagaaattctactcctgggtaaatacccaacaggtgtgcttgcacatgtatgccgaaagtgttgcatacaagaaagtttcagcagaattatcataacagtcccaaacccaaagcagcacaagtgttcatcaatgatagagtagaaaaataaattcctacagaggaatcctctgtatagcaggggccatggaatttgggctggtaaaataataaatctcaaagtcggccggtcgcggtggctcacgcctgtaatcccagcactttgggaggccgaggcgggcggatcacgagttcagcatatcgagaccatcctggctaacacggtgaaaccccgtctctgctaaaaatacaaaaaaattagccgggcgtggtggcgggtgcctgtagtcccagctacttgggaggctgaggcaggagaatggcgtgaacctgggaggcggagcttgcaatgagccgacatagcgccactgcactccagcctggtcgacagagctagactctgtctcaaaaaaaaaaaaaaaaaaaaaacaccaaataataataacaataaaaatttcaaagtcgttcattccatgctgtagacgagcttgggtggatagaaatcacatcaatacggagatgatccacagcagcaactgctcttcacaagagccatctagggaaaatctctaaagcacatgtgatccaccccaacaggaccacctcaactcctattcttgatcatgcaggaccaccagaaagcttcattcttgtatttcatcaatttagcccctggcagaattttcttttctagcttgcatttattgcttttctctctccaagaggacaagcctccgtcctggcacccagctctgaggtgcgcgaagagaccttagaaacacaaagagcaaagtttgaattccagctgcatctcttaccaaattgtaaccatgggaaaaattacttatctgtccaaatttcaatgtccttatccataaaatgggtataataacatacatatatagcatacagttatatgaagatcaagtaatgtctataaaatttcatgcaaagaaaggtgctccaatggtagctattcgtagcttatgttgattctgactagcttccatttcagcatacaatgatttgaatgcttatgtgtctccaaaattcatgttgaaacttattccccaatgcaatagtgttgagtaatgaggcctttaagaggtgattagctcatgaggggcttcactcatgtataggattagttcccttataaaagaggttttgcatagtgctcaccccttttgcccttctgctcttccaccatgtgagaacatagcatttgtcacctgtagaagatgcagcaacagtcaccatcttggaaacagagagcaaaccctcaccagactccaaatctgctagcaccttgatcttggacctggcagcctccagatatgtgagaaataaatttctactacatataaattacccagtctatagtattttgttatagcagcaggaatggactaagacaatgtgtttcgacatttactcagaccttgtcttttctcctcacgacaatggctaagaaccccaagagtgaatcaactggttcaaactaagcataactgcaccagaggagttgcgcacatactcagctgactgctcgggaaaggcatttgtgtgtcacctgaatgaaggctgatttccatggatggcagccagagggacaaagagggaggaacaaagagggcagggaggatatccaggtaaagagaatgagatgaacctctggattatcttttgaaaactggactctgatcttggggccagaaaatactattatgtgagtgttgacagcctttctgtaccttgctagcgagccagaattttctttaccttctttcttccatcctctaaaaggggagctctattttcgctagctcagttatgaggcctctgtgatgcagaatcaggcaatgtgcacagaaacacaaactggattctgggaaaggcaaaagaataggagcagatggaaaaggacagtaaagggagacaacaggctggacactcggggagaattttttttggcactgagaattggagaagggaaggaatttgggggaagaaactgatgaccactttggagaacactgtaggtggcagagacaatcaaataaccacaaagtggcaaatctgccttggaatttaatttggaaccagttccgttggacctggagttcatgctaccaaccttcatgccctcctgtgacagcaagagagagccaggagcttttcaaagagatgaccagggttataggtcacagatctgcatggagggcatttttagacacacaaatccaggcatgactgtagctgaaaaggaacaagggggaaggaagcaactagaattgcatttatcatcaatattgcctttggtccactttacatgggtgactaatgaatatgttgactagtgttccatgaaatatttagtatgtgttaactttgtctttgtttcaagacttcttgatttactcttacatgttaaattatcgaacatttgaattatagaattatctgaacacaagtctttatctctgaggatttgttctacaaaattgcctctgtgtaccaaatctttgttatatataagccagcaatagatctggaattagcttaatgcaatatacctaaaagtcacagatatacgaataattttgctgggatattaccttaagcttaagatataatcataaccacagtcatacattatcttttatatgataattgttttgattatatagattcccacaggagggaatttagatagtaccataaatataaacaagataaaaatcacccataaatcttaccactcagagataatcattattcatattttaaaatattttcagctactcttttttttaatgcctatgcagacagttattattatataattgaaattattgtggctttttacttttatatactgctgttgttaattaatactaaattctgataattttaagatacaaagaaatgttctttagagatttaatttattatggctatgctctattccccacatgtggatacatcataatttatttgaaccttccttaatgttggagttttaggttgttttcattattttcctattatataatgttgtgataactatcttgatacagtactaatatttgcctgaacttttgcttttataacaacttgattgagatctaattcacacatcatacaactcacccatttaatgtgtacaattcaatgtttattagtatatccacagcctggggcatctttcaccaacatctattttagaacattttcattatccccaaaagaaactacacccccttcagtcatcaacccccagttcttccatatgccccacctgcactgtagacaaccacgaatctattttctctctctaaagatttgcctactttggacattttaaataaatgaactcatatgatacgtagtgcttcatgacagtcgtctttcattttgcataatttcaagggtgatccatctggtagcatttatcagtacttcattcttttattgccaaatagtatatgacctgcatggctataccacatgttacgtatccattcatcagttggtggatatttgggttgtttctgcttttcagctattacgaaataatgtttctatgaacattcatttacaagttagtgtggacatatgtttttatttctcttggatatataactaggagtggaaatgcttggtcctgtggtaactccatgtttaatcattttaggaattgccagactgtttttcaaagtgtctgtgccattttacattcctgctagaaatgtataaaggtttcaatttctctacatcctcaccaacatttgttattatccatttttttaaattataaccatccatttgggtatgaagtatcatcttgtggtgttgatttacattgtcctaatggctaattgcctgaatttctatttaattaagatactttttggatataaagttactgaattaagagtacaatttttaaaaagttaatatatagtgccaaactgcttttcactaattgtgtgaattttactctgcctggaagtatgtaggtcactagttccctaagattttcatcaaaataaatatttaaatgggtatcactttaacaccctttcttatgaccctggggcttttcatatacataataattatttatgtaactccagtgagctacccatattctttgtccattttcctatggggtcttagtttttactttttattgagttatgtacatttcttctattagtcatatttttcatgaagtattttagtgtacatttgttttggaaatttttcttaaaatagcctacattcatcttgaataatttttattaaataaagaaagtttttttttttttttttttttgagacccaggctggagtgcagtggcacgatctcggctcactgcaagctctgcctcccgggttcacgccattctcctgcctcagcctcccaagtagctgggactacaggcgcctgccaccacgtctggctaattttttgtatatttagtagagacggggtttcaccgtgttagccaggatggtctcgatatgctgaactcgtgatccgcccgcctcggcctcccaaagtgctgggatcacaggcatgagccaccgcgcccagcctaaataaggaaagttttaaagtaaattatcactataaaacatctgaaaaagtaaatatgtcagagtctttgtgataaccaatcagaccaatcatttccaaagaattaaaaaagatttagaaaatttaaaaattcgtatttgtttatacaatacaacacattaggcaaatggagactaattgagacacagcactttgattacatgagacacatccatgcttctccctgaatctaattgaaaattaaaatatacttatgttcaatgaaatataggaaatcagaaatggtaattatttgggggttgatccttttcatttagtttctttggcactttaattatatttatggaaataactggagttttaaaaaatatgttgtttagtgtcaatttctcaatgtttacttgtatttaaaaaactgtcatgataaaattgagagctgagcagcctatcactttttggtttgcgaaattcttaaacagaaatcgccaaagtatagcacacattctctggctaattgtgcttccagaaggttaagtgtgataggtgagttgtgtgaacactgaacacctttcccccagttctacttaaaagtcagaattgctcataagtggattacaaatagctctagttttcttttatgaagatctgtgaaccccaaatgcttacttttgagtagttctgagtttatagtcttttgaatttaagcaccgtctttttaggcctaatgagtctccccttctacgcagagctgcctggttactatggctgaagccagaggcggcacagcgtaatgtgggatggctgacagataccatgttcttctctctaaactatgtgcttcagtggctgaattttgatccattcaataggaggaaactgcctgtattatgcttaaatgtaccagataaggaatggagaagaaaggtatgggaaaatgtcctgtgttgatgtatgtaaacatcattggtctggggacacacattgtgtgatgggagtaatttatcccttcttgttactttttctcagcagtggcattaaataaggaaatgtgccaagtgtcccagtgctgctgtcattgggaaggtattgtaacaaaatgctaaggagtaagatgcactcttttttttatatatgtatatatactttaagttctagggtacatgtgcacaacgtgaaggtttgttacatatgtatacatatgtcacgttggtgtgctgtacccattaactcatcatttacattaggtatatctcttaatgctataccccccctgcctcccaccccatgacaggccccagtgtgtgatgttccccaccctgtgtccaagtgttctcattgttcaattcccacctatgagtgagaacatgcgctcttaataggagtcctgtgttggacccctattatgggttgaattgagtcctccagaaagatacatggaagtcctaaacctccagtaccccagaatgtgaccttatttggaaatagcatcattgcagatgcaattaactaaactgggatgaggttacactagaattggttgggcccttaatccaataaggctggtttccttataagagtgaaatttagacacagatacacacagagagtagaaggccagaaggcagaagcagaaatttaagtgatgcatctattagctgaagactgccaaagaacaccagtcatcaccagaagctacaggaaagccatggaagaagttttcctccaagtcctcaggaggaactaaccctgctgacaccttgagttcagacttctggcctccagagctgtgacagagtagggttctgttgtttcaagcaacccagtttgtggtcctctgttacagctgcccttgcaaaccaacacaggctccaaatctctagccaaactgcttgataactttggctcaatttctttatctgtgggatagaaatcataatagcaacccagtgtgaggatccaatggacttctttataaggggaaagcttctatgtttggctacctggggcttctggccttaagacttgcacccttccctgtcagcaatactgctgcagtttagagaccggtggctgttaaactgcagtacacatcagaatcacctggagggcttgttaaaacacaggaggactgaccccacctccagagttgctcatccaggaggtctgaagttgggccttgataacttgtgagtctaacacgttctcaggcgatactgatgctgcaggtccggagaccacatttcgagtactatggaattagacacttggggaagatttatggggaacaaagtagcaaggccagccttagagggagttctgaaagggcgggaggctttgcatcacgtgcagataagccttattcttgtcgccacaatgggtctcagctactctgcccttctcctatgctgtaacacatggacatttatgctatcttattggctacaggttcttttccaatcttcattctgaacttggaagttattttcttgcacattctgggcttggacttgaatgtctatctattgttccattttgagcttccctgagtgatgagatttgagatctgatctaaagttaatttcagcatccctttgtttgacctgccccatgaacccttttctggatgacctcttccttcccaacacatactttattttttaaaatttcttacatatatatatatatatatatatatatatatataatttattatactttcagttgtgggatacatgtgcagaacctgcaggcttgttacacaggtatacacgtgccatggtgatttgctacacccatcaactggtcatctatagtaggtagttctcctaatgttattcctcccccagccccccaccccccaacaggccccggtgtgtggtgttcccctccctgtgtccatgtgttctcattgttccactcccacttatgagtgagaacatgcagtgtttggttttctgttcttgtgttagtttgctgagaatgatggtttccagcttcatccatgtccctgtgaaggacatgaactcatccttttttatggcttcatagtattccgtggtgtatatgtgccacattttctttatccagtctatcattgatgggcatttgggttggttccaagtctttgctattgtgaacggtgccacaataaatatacacatgcatgtgtctttataacagaatgatttataatcctttgggtatatacccagtaatgggattgctgggtcaaatggtatttctggttctagatccttgaggaatagccacgctgtcttccacaatggttgaactaatttacactcccaccaacagtgtaaaagtgttcctatttctccacatcctctctagcatctgttatttcccaactttttaatgatcaccattgtaactggcatgagagggtatctcattgtggttttgatttgcatttctctgatgaccaatgatgatgagctttttttccatatgtttgttggctgcataaatgtcttcttttgagaagtgtctgttcacatcctttacccactttttgatggcattgtttgtttttttttctggtaaatttgtttaagttctttgtagattatggatatcagccctttgtcagatggacagattgaaaaaatttttttcccattctgtaggttgcctgttcactctgatgctagtttcctttgcagtgcagaagttctttactttaattagatcccatttgtcagttttggcttttttttttcttttttttttttttttgagacagagtctcactctgtcacccaggcaggagtgcagtggcacgatctcagcttactgccacctcctttgtatatgacttattaggtgcttaatcatcatacattcacctatggaaccagttttcatgtggtcactcagagactttcccgttgatttgtaaaccgcccccaccctccccgccgccaacccctgcctcactctgatcatgttcagctagacttaggaaactaggccatcattgatcctccaaaacactttaatttcttttaagttttgctaaatttcccaaagcttttccctccattcattcattcatgaaatgtggaacacctcctgtgtgctcacagtgtatgctcggcatgcagtggtgaacaaaacccaacagtgcatgcccttgagtttgcagaatagtgagagaagggggagatacacatttaaaaaatcacattaatacatgcaaaatcatagctgtgacaagtgcatcaaaggagagtagtacttagatctacaggactatactggtaaatctgaccctgttaggaagctcagagaagtcttttgaatggagatctgaagggtattcagggaattagccaggtataaagtagaaaacgatcaggcagagagaatagtgtgtgcaaagcttgggcaggtgaaggagtgtaccagagaccaacctttagtgtgggcatcagggtacatgaaaggtgctggtgctgtgtggctgaacaagtggggaagtgcccagagcatgtaacgttcttaaggctgtgttctcattctgaccagatatgagccattggtcatctcacttgtttccacttgctgccctcacacctgtcatcagacttcctctactcaagatgcggacttcatccctctccaccttgtcaccagtgctctgtctcaggggaataggtaccccagggaaataggcatcccttctcctttcccaggtgacttctccatttggcctttcttccttccctaccgcattctccagtgaccgcgctcagtgagcctctaagtctccagggtgacttttatctgcaatgtaactggctccttccctttgttcattaacacacccaggtggcccagcttaagaaacaaacaaacagaaaacttcctatcagttcctttgttatccatgacctgatgactggctcctccctttccattggtagtaacggggtagggggaaaactgcctttgcttcttcacttcctctcttctcctgactccttagtcagttctgccttaatagagaattcttccttgctcaatgtgttcactggtcttaagcttgagcatcggatggaatttcctcccctctgtaatacaccttccaagttaagggcatcttaagagttgctgtcaacattccccaattcaactgaattctattcacagaaaactaaaagtattttctagatctttgatctaaggaatttcctacttggcaaacttgctgtaactggacctcagagaaaattaatcttcctgaaaggatagcgttttaatgttaaatgtttgaaatgtagttttaaagttgtgctttatatttgatttgttctcattgaagtcggctttatatgtgtggcccagagaaaaatacaagctgagcatgtttaataaaacaaccaatctgaaaaattgtttttcaaggggaaaaagaaaatcctgggccaaataaagatgaataatctgtttaaatagttgtaaattgtcgattgttttatcccttcttaaagtgtaattttcttttaaaaacacagtaaagtagggccaggcatagtggctcacacctgtaatcccagcactttgggaggctgaggcaggtggatcacaaggtcaggagtttgagagcagcctggccaatatggtgaaaccccacctctagtcaaaatacaaaaatcagccgggcgtggtggtgggcgcctgtagtcccagccattcgggaggctgaggtggtagaatcgcttgaacccaggaggcggaggttgcggtgagctgagatcatgccactgcactccagcccgggcgacagagcgagattccatctcaaaaaaaaaaaagtaaagtagaataaatatattatcagtattattttcatatataaagctgatacagaatattggaagcttgtactcagagttcttagtatcattgacaggtttatgctaaattaaattatctctcctttcacacttggattttctataatcaagagaatgcatcatttagatgatggggtaacatgcacactgtgactaaggaaaagcttttctctgaaaggctaactagctaccaaaatagcaacagaacttggcctcttttttttattgagacagagtctcactctgttgcccaggctggagtacagtggcatgatctcggctccacgcaacctcctcctcccagattcaagtgattctcctgcctcagcctcccaagtagctggaattacaggcacatgccactgcacctggctaatttttgtattttttagtggaggcggggtttcaccatgttggccaggctggtcttgaagtagtgatccacccacctcagcctctcaaagtgctgggattacaggcatgagccaccgagccaggccagaacttggcctctttaacacagtactttaagaggctgactagccaaatgctatgttcagggttaacaatatgccttcaacatctctagtgataatatccagacaagaatagaataaataagccaatggtaaagatgccctaacaatttgcccttaattaagatgattcccattccagaagtgccactgctctgagtccagttgcttggcatttatttacaagcacttagatgccaattcccaggggattgggaggttcagaccctggcagcctgaaccataccaatcacataaacaaaaggtttgatttgtaaatcggaatgtcaatgtcttacagggacaattgacagtttgctaaaagactatattccttgtcactcaatctgcccacccttttctgagaaggaagcctaatgcagtgcttagcaggaactatagttgcctaaatctctgagttggtagccaaacaagaaatggacctgagattagaatatcattgcgggaaggggaaaggggatgtaacgccaagtgtttttgattgcaacctagaaaaagcagtgttggctgagtgaacaaaggggaatttatgggaaaggcaatgggagctgaattgtcaggaccctggagaaccgggcttggacacatcgagggagtagtaaccataaccattgaacaatctgctcagccagtttcccagtttttttgaccctctgctggacctagctttcaaaatttaatcaggctttcacaattgcatttagcctatatctagcaagtgtctgtattatctgtgaagagttataaagaccctgcactcaaagaggtaagcatgtctatggtacatattaggccaaatacaacacaatcagggctgaggcttcaaaaataaagagaggacacgagggtaaaaggatggggaaagacttcaaaggaaaaacactgcaaatgggcactggaggtggcaggattttgtggggaagtcagaactatttcaatctgcaatggaaatagtgatgatggtacagatgaagagtctaacatgagtcacccacttggttaagcactttcttctcctctgtgattgggttaaaagggtttatctaagtgaaaaggaagtttttgcagggagaggcccctgtactttggggggaggagggctatatgggagagaaggaaaggtgggaaaggtggccatccccggcagaaagacccacacatccacttcaaaagaggttaaaaaaaaatgcttctctctgtgtatctgttggagagtgggtggtaggtgacaaaactggaagcaaggaaacaaagatggtctttcccttgatttctcatctctaggaaagggcgtgttagccctgcctgagctaggtgggtgttcaatgctactggggcgcatccaaaggcacaaaatcttatgttaagcgccactcaccctggaaaaactgggtcctgcgcaatcgaggttttagtatctggtgaaggcttttgaacatcagatccaatgtggtcagaagaaagcatcagtgtcaatgatacattgttcattcttttattcattcattcattcattcaaacctcttctatttattaacactgactagaggctctaccctgaattgaggctaaaggctggagtagaaaaagtaaggataagtcacttcccttcattgcctctgttttcctatctctaaaataagaagttggagtttaatgcctttgctttgcaatgtttcttatgcttaacgagcttacacatgaagtcaggagtagtttgccccggtatgagccagaggcacagagacaggggttgaagctcagaaagatgaatgctgctgcttttcctctgcctccttgaagctagggaccctctgaaaggtgccagggatgcagcagctctgtgcaaatgagaggtctggtatttgccagaagctttaccataatgcaaggagaaatagtgcatgaatgatgtgatgggattattgctgaccacgaatttactgcccaattagtgaggtgatattttgtgggggtttcatttaattgggactttcctgagcagatctaggtttatttaacagtttacattgatttttatctcgggagactagggcagcatgctgaattaccacaaccttttaccaaacaaagctcttcctcgttgacttttgattcccctttccctgcattgtgcttctgcatttctctccaaagcctctgttgaagattctttgcaaccaaagatggcatccatgcttagaattgttcagtgtctggggtatttgttcctctgtattcaagtaacaataaatgtccctaggaagatttttttttcaaattactcgtctggaaaccccttgggattcaaggtccagcccatacatgcctcgatacttccccttctcaatcccagcatctcctaccatgatgcttgctagtaggaggagcttaacaaatttcttcaaaggtgacatctcaaaggtctttacaggcataaattgtggcttcaatacaaatgctgggtttagatgatgtatcagtctgtttttacgctgctgataaagacatacctgagactgggcaatttacaaaagaaagaagtttaattggattcacagttccacctggctggggaggcctgacaatcatggcagaaggtgaaaggcacctctcacatggcagcagacaagagaagagagcttgtgcagggaaactcctgtttgttttttttttcttttattattatattttaagttttagggtacatgtgcacattgtgcaggttagttacatatgtatacatgtgccatgctggtgtgctgcacccattaactcgtcatctagcattaggtttatctcccagtgctatccctcccccctccccccaccccacaacagtccccagagtgtgatgttccccttcctgtgtccatgtgatctcattgttcaattcccacctatgagtgagaatatgcggtgtttggttttttgttcttgcgatagtttactgagaatgatgatttccaatttcatccatgtccctacaaaggacatgaactcatcattttttatggctgcatagtattccatggtgtatatgtgccacattttcttaatccagtctatcattgttggacatttgggttggttccaagtctttgctattgtgaataatgccgcaataaacatacgtgtgcatgtgtctttatagcagcatgatttatagtcctttgggtatatacccagtaatgggatggctgggtcaaatggtatttctagttctagatccctgaggaatcgccacactgacttccacaatggttgaactagacactcctgtttttaaaaccatcagatcttgtaagactcattcactaccacgagaacagtgtaggaaagacccacccccataattcaatcactcccactgggttcctcccacgacacgtgggaattgtgagagttacaattcaagatgagatttgggtggggacacagccaaaccatataagatgaggtgcagaggatgcctgggcgactaaatcaatggtttccaaaggatttaatgtaatgcccttaagtagtttttttctcccaaggtagtttctttgaagttaagcagcatgagacttccaggttggtggatgaagaaccagggaaagatagaaactgccttttttataatgtagggctcagttaagtattcaaagttccaaggaggcaattcaggcccccatttcacacctttcactgttagagagcagagctcctatccatcccaggcccttccactttgtagatcaattgctctatcttttggcagcttcaacaaagccctgtcttatgaaaatgctttattgttcagatcagggacctggtagtaaaaattaactataaaatacttttttttctattatgcaagtaatgggtagcctttttaaaaattggaaacatagagaaaaaagtttattcctaacaaccggagcctcagtggattaaaattactcaggtttctcactgatgctacatgcccattgaacgtcaggtggggactctgcactgctttagtctcactctggatactggctgacagaccacagctttctagaatattgcggccgaggaaaagaaagctttgcggcatctcatacatctcatattgctgctgcagaagtgacagtcacttttcctcttaaacctctagtcaaaacttgtaaccatgcctccacttaacaagaggtttggaaagtgcaattctgccatgtagggaaaggtatatgaacagtggtaagggctaccacactggagaatagctcctttcatctgcctccctttgcagcctgcgtccctagtccatgcgctctactgctccagtgcccaccactgcttgactctgcctttgtgtgtgtcagttcacattatcaagaaggaccatgactggtagctctacggatggaggacccttttgtagcaggtgttcaccctgtgcccaagccgcagtgcctagaagagtggggatgggtctgtggctcctatcaggctgcaggagttgcggagacagaaaaagtatttctaggactcccatttggccttgcagtctctacacatccttggcaatttctcccatcttggcttctccttcttatcactttggtccacatacggggacagcgtctaagttctttctgaccacctcctcagtcctagaaaaaccagacttggttaagtaccagagcacagaaggcatttagtgctgctctgctcccaagtcatctattagtttcactttagccagccatacctccttggttacatatgaagcatctgtatataacttagtatcatgctttttcacattatattttgatttttatcggaccggaaaccctaaatccacaagcataacaacaagatcacatttgggctttttcatttctgtaaccagaggattgaacgctagttttgtagtaagacttcaattctatttatccgtccaggcttaagggttcctgttcttctttttaagtcattaaattgtatcagacaagggggaaaacgcgtgtgtgactttccctaaggtaagatgggcttaagggatattgaaaccagggcagagaaatgttttctgtgacccaccagtcagggcaaggcatagaaggagcaatgacttattcattagcccagatagaaggccagtctttttcaggctgcggcgcagagacgccaggctcaaagggcaggagggccgtctgcaggcagcgccgccgcggctacctggaagcccagcaagtcacctgagtcctgcgggtgcctgggctgccaatctgcagcgacccgtccgcagcccccgggggcaggaacaccaaccccgggacaggaggacgtcctcggcccgctgactagggatccgccagcgggtgccgctgagccacatccccgcagttggcgccagcatccaggtaccgcgcgccacagcacctgcctgggcgttcccgcgcttggggcggggcttcccgcgtcccctttaagaggccgcatcacccgcccttgacgtcagagtgtttctccgcaagagcccgtgtcccgctaggctccgcgccctcgcgcccatagccccggcggcggcacgaccagaggcggccaggggagcgcgccgccccgctcggccctccagtcccgctccgccgcctccctcccgcacagcagccgccagcgcggcctcctgcaccatgtcggtggccggcctcaagaagcagttccataaagccactcaggtaaggcgcgcggcaggtgcgtcccggggcagtccggggcgaagctgcgaggggcgcgctcggcgctggccgtccggcggcagcttggggagttcggcaccgagcctcgcccgcgccggccgcgccccgcctcgcaagccaaggcggcggctcggggcatccccggtctgggcgtccaccctcggtcccccgcccccggcttggtgcgcgctgccttcccgcgggtccccggcgtcctgcctggtagcgctgctcgccgcccccgcatcatctcgcgcccgtgctgcaggaaggggaccgcggctgcactgctgccgcggcgcgcaggtgccttggcggcgcggtgggagattatgtaaagtcgcctcttcacgggtgaccttgcggagtcggtgcacccggctttcccgggatgtgttggcatgagcggtggccgcactgggggtggcggggcggaggccggcggtttgcgctcctctcccttaccctgttgtcagaaccctccttccccgccgcccgcaggctccaggggaatggaaggctggggtcttcctttagggacccgcatacattaacttttacctggagaactcggtcgtgaaactcctttgaggccagggcatgacaaacagtctgcgggtcttaaatatttccctaaaacaaccaaattgttgaagacttaaaatcatcatgtattttaaattgtttttaataaatctttggcatcttggatgtgcccatttttctttatggggttaataagctgtgactgtaataaaactgattaatttagattctaataattaaaatcattggactcaaagaattttacataggggcaagtaagcgaatacttacgctgtgacctatttcttacataatgtgtgtgattactacttttttatccttctgaaataggttcaaatttatgggatctttaaggattttgatgacttaccgcgaaatgtttttcatgatttggtgttaaatagtttttcataggttagccttaattaacgagctttctcataatttctcggaagtagtgaggtttttcctaggctaccacagtggcagccttgttatgaaccacatccagaaaaggtgagggttgtgttttacagaaccttggttaacttagggtgacagatgcagcatgtaattcccgtcgtgtgtgtgtttgcacgcatctgcatcatcttcatcacacattcttgcctttatagaatcaattatacctgtcaacttaggaaatcaagaaaagtaagactatttctgtaaaaatgtttcttaatgtaattatttttgcttttctattataattggagttatctgtgacctctctgccagacatgtttatgaaagtaagtgatttgtttgttgatgtagtttggaaggcttctaataactttatactgcaagttctttcaggtttacagaaccaagcatatgtgctgcccaggaattctgtggcaggacttcttcgatattactaacctttttgattgctctactggtcacttctctatagcatatctcagcactgcgtttaccaacacatcttttttccacttggattctaaagatttcttttgcaaagcttagtgccctcaaaggcaattaagagtcttggctttggagtgggaaaggctaaggtttgaatcctgcctctgctgcttctgaccttgagagagtatttaacttctgaacctgtccatgctgaagtgatgataatttccgttgtctcttcagggttgaggtgaagagaaacgagtgtgtagaacacacgtataaagtgttcaataaattatagttattgacataaaggatatttttattagtataaaatactatcccttatgctgtgaagaagttacccaagctagaccttttagtttttccaacttaaaaaatagagcgctccatttccgctaaatcttgaagttctgtgtcgccctaaagtgtagaaaaaataatttaaactgcgttaggaaagaacttaaaaggttggagaaggtcggcatgtgatgcgatacggttaatgtttatcacaccgaatccaaatgcagaatcactgcgtcattgtcttccttttactgaaaagccttttatttgaaaggtgaagcagcacgtagtctcttatccataatttagtgtagcacactcttagaaagtctaaggcacaggtgactgttctgtgcatatgtatatttaggagagtatgtaaagcccatgttaatgtttgcatgtgacaaaaaaattagagaaatagtcctgtcctacttttgtagccatttttttccatcaggtccgtgaacctgatgttatctacagagaagctttagacctagaattacttccttttgagaactgatgtgctggataatatagcctgggtttgtttgtttgtttatttatttattcatttgagacaaagtttgactcttgtcgcccaggcaggagtgcaatggcgtgatctcagcatactgcaacctctgcctcctgtgttcaggcgattctcctgcctcagcctcctgagtagctgggattataggcatgcactaccacgctcagctaatttttgtatttttagtagagacagggtttagccatgttaaccaggctggtctcgaactcctgacctcaggtgatctgcccgcctcgattacaggctgagcccccgcacctggcctatagcctgggtttataagtggaaggagtctgttcacgcaaacgtttctttctatggaattgagcttttttgcttgtgttagtaagcgatgataaataaaacagtatattgtttgtacttggaatttctgattaaatgtgtcacaactgttgtcttatattagaattggttatttctaccttgttgctgacagttattttcaatatgtttacaatttggaggtaaaaaaatgcttttgccaagtaaaatttattagagaagaaaatcctttcagcatgaaaatatataatgataccaaaaattgattgatcatcttattttcatgtacttcattacttaattgctcataaagatataatttactgtataattagaataaagtattctttttttactgtaataaagggcagatgatcttgtgttgctcttttagtgagttttattcatattgagatttcattttacaaaagtcatgtcagtttttttacacttgttttaaactggcagcagcttagttaaaaatagctgtttccagtgaacatgaagctcctacaaaatctgtatttttaaaaattcactctatcatgcatatgatgtggacacattttgctttacaatatgtaaaagtctattataaagtaaaatatattaggtcattttatgagtttgctggagctgctgtaacaaagtactacaaactgagtcgtttcaacgacagaaatacattgtttcccacttcttgagacaagcacacttgaagtctgagaccaaggtgccagtagggccacgagctctctgaaggtatgagacaggatctattcgaggctgccttcttagctcttgtgctttgttgggaatctttgggcttccttggcttgtagatacatcaccttggtctctgccttcatgctcacatgacattctccctgtgtgtgtctcagtgtccaaatttccccattttgtaaggaccccagtcatataggattgggcaagcccatcctactccagtatgattttatcttaaataattaccatctgtaatgcccctatttccaaataaagttgcattctgagctattgtaattaggactttaatatgaattttgggaggggcacagttcaatccataacagtcgttatttgcataaaaggattaaccacagtattctatatttgattcaacatctaagaggacagttcagcctataaataacatataactttctattgcatcaaaaagatatactttctccttttttaatgagttggttagtatattgctaagttctgaatgtgtccctctaaaatacgtatgttgaagcttgactgccaatgtgacagtattaagaaatggggcctttaggaggtgactaagtcatgagggcactcatgattaagtcatgaatgggattagtgctctcttaaaagaagttgaaggggtcaccctgtccccttccaccgtgtgagggtttagcaacaaggcaccatctttgaagcaaagggtgggccctagccaggcacaaatctgttagtgccttcatcttggactgctagcctcccaaactgtgagaaataaattctattatttataaattaccccgtctaagatattttgttagtagcctgaacagactaagtcagaaatatacctattataaattgtgttttctgatttttttaaatgataaaattaatttgggtaggctgggttttatgatacagtctggtatatgtttatttgtcacactcagattccttaactgggaaaatttcatcatgtttgtgttctgtgtctttttgttttacctaatttcctctttcagaatgctgtattttatatggatgctttgctcaggagaccattacataagtcttttcatgcatttgttgatttggtgagatgttaaacttactaagtattggattaaatatctaattagttatgactttatctcagtgagattttcagtttcttaattgcctctaagcagtcaactctctgctgcctttaaaatcttggctgtggcttgttgcttgacccaggatttctacacctgtaccctttcacattcttagccagtagtctctaataggctgcaaggggcctatatattttataaaattataagtaacattttatacatgcatttttctgagggagaatgcccttagcctgttaccagattcttaaataaattcctaattgctgccccttcctcccctcgaaaagtaaaaatagggtggggcgtggtggctcactcctgtaatcccaacactttgggaggccaaggcgggcggatcacttgaggtcaggagttcaaaaccggctttgccagtgcagtgaaacctcgtctctactaaaaatacaaaaagattagctgggcgaggtggcaggtgcctgtaatcccacctacccaggaggctgaggcaggagaattgcctgaacccaggaggccgaggttgcagtgagtcaagatggtgccactgcactccagcctgggcaacagagtgagattctgtttcaaataaataaataaataaattcatcatgtcatcaggagaaagtggatgtttcttacaataatcactccaacagttctgttactgggctttaggatgcctgatcaaaatgcagccttctctgcattaatttagcagcaatcaaatgtaaaaaacctttccagaggtgtcaggattgaatgaggtaatgcttgtgagagtgccatgcttgcataataaggatcacttgaaccatgtaaaacaaaatgttgttaatgcgcttgaagtcaacgatacgggcctgtggggtatatgaaaagaaagtggtgactgaaaatgatttctctgtagactgagagtcctcgtgattgaagtttgtgttgttgaaacagctatatttttgcaagcttttttccccatagtgattctttaatattttaaattgagtttatatgaattttggtttcagtctacttagaaaattttaaagtaacctgcaaattaattagaagtaccctagaaaatggcaagacttggttggggcaaatggtgactgttttgagacagatgtcattgtggaagggagaggtttaatattcaggggaagggagctgaagcttgcagagcagattccattctgccaagcctcttgtgctgcatacagagtctcagggcatcaagcaacccgagggctttcttcagaggagtagcttgaggcagcggcgagagaagggcaggacacactgacaaatgaataatgagaattaggtgaggagatggagtttaagaactgcttcaaactttaaggtggatacctgatggggctttctagagatgagcaattcttctcaatttaaggccagataggggagatgctaagtaggtaagaagtcagtggattttttggcctccttttttctctttttgttcttttaatccttcgtacccttgtcctgtgttcttttaggtaatgttcagtgaggtgtagccacaagaggggacataggagaggctcaagaaaacagagtttattatactcacatgtcttagaatgacaatcactgtacaggaggataggaggggggacacgtggggtggaggtgacagctctgagagcaggatcagctaagcaggtgggaaacaggtgggagcagagagagcaaggactgtgggcaagtgcctttactagtgatctcagtgcagttcacagctcagtgcagttcacagtgcgttgcattggtgcattggtaggtcgtggtcagaagaagacagagaggtgaacttgtggtaggggccaaccttatcaaacttgtgcacctggttacctgggtggggtgttcacagttagcgtatgtgggaatgaatgttgaggcagcaagaggcagcaggagacaacatgtgaagttttgaaactttgtagtacaacccttctcagtgtttttggtttagaatttattgtttccataatcacttaaggagcctaaaagcttaagaatgatgtacatggtatccgatggataataaagactaaagagagctataactatacttattaaaatgccatgattgtgagaccctgccaagtcttttgcattctaccaacaaaatattttcatgctatactaaatcattagctgatgacaaatgcttcaggaaataatttcactatttataaaggttttacatttagtacaacttctaaatgccaaatatgatgttgtagttgctctaccctaatctccctccgccatcccctgggtcaaattgtatatagtagtaatgaatatggagaagctgtctgtaatactcgtgaagaacccacagctccatggaggtttacttggatacttaggacactgaaggacctctaggcagtgttttctgcctttttttgaattatgatatatataaaaaatagaaatatcttttttataattcaaactaacctttccccatagatactaatggaagcagttttataatgctgagaaacatctcaatatcaagctatgtattagtctgttctcatgttgctaataaaggcatacccgagactgggtaatttataaaggaaagaggtgtaattgactcacagttctgcatggctagggagggctcaggaaacttacagtcatggcagaagggggatcaaaaatgtccttcacatgacggcagcaaggagaagtacagagcaaagtggggtaaaagccccttataaaaccgtcagctctcgtgagaattcactcactatcacgagaacagtgtggcggtaaccacccctatgattcaattacctcccaccaggtccctcccatgacacatggggattgtgggaactacagtttaagatgagatttgggtggggacacagccaaaccgtatcacagaataatgcttgaaagaaacataaagcagatagcctatgcttttaaacgtacaggaaatcggctgggtgcggtggctcatgcctgcaatcccagcactttgggaggtcgaggcaggcagatcacttgaggagtttgagaccagcttggccaacatggcaaaacctcgtctctactaaaaatgggaaaattagccaggcttggtgatgcacagctgtatttctggctactcaggaggctgaggcaggagaattgcttgcacctgggaggcggaggctacagtgagccaagatcacaccgttgcactccagcctgggcgacagagcgagactgtctcaaaaacaaaacaaaacaaaacaaaaagtacaggaaataatgtccacagtgaatgactccagtgaggaaaggagagaaggggagtcaggacagttattgtccataacagtgatggcatcctgcagggggcattgtgaaatcccctgcctgccagtagaggaagttccttggttttacaatctggctctgcaatctgggaagaactcttgttctttcttatatatatttggccaggtctaaggagggttagaggaaatctgccctctttgggaacggcataacttttcagtcaacttcctgtttatttaaatttggggattgttttacagtcatagggttttcactatccatggtagatttgagtaatgaaatttcttcataaacttagtaggcttctggccaagtgcggtagctcatgcctgtaatccccgcactttgggaggccgaggtgggcgggtcacctgaggccaggggttcaagaccagcctggacaacatggtgaagccgcttctctactaaaactacaaaaattagccaggcatggtggcctacgcctgtagtcccagctactcgggaggctgaagcttgaacctgggagagttgcttgaacctgggaggcagaggttgcagtgagccagattgcaccactgcactccagcctgagcagtagagcaagtcactgtctcaaaaaaacaaaaaccaaaaaaaaaaaaccagaaaaacttcaacttaataggcttctgatgtgttttcttgtgagtttcatttgccaatttctatgatggaaattcttttttagacctaattttcatccagtagacttggttgtgttactctgaacttaacaagagggcctgatactttggcttaaccaagaagtcttaatggtactttgttgctcaaagtctttttcatttatatttcccgttatttgcttcagggactcaggatgaccctggatcggttctgccatctgtaacatatggttttcaaggttgccaaagggaaagaatatgtttgaacaagcatgggagatgttcataagccaggcctggaagaggaatatggtagacagaatgctacgattgttggtgactcttgctcttgtgtactctcctcccctttgagtgtgggtgcaatgttcaatttgaaaagatgttattcctgagacttttaactttgtaagacaaaagggagattatatgattggacttaatctaatctcatgagccctttaaaagcaggatattttctctggctggtagtggaaggaaaaatcagagagattggaagtatgagcaggactggacatgctgttgttggtttaaagagggaggggccatgtgagtagtaatgcaggcagcctctaggagcagaaatcagctctttggtgaccatcagcagggaaaatagggatcttagacccacagccttgaagaatctgagaggaagggaattcttcccccaagcttccagataagagcccagtctagccaacgccttcattttggccttgtgaggccctcaacagggagctcacttaagcaggcccagacttctaatttatagaattgtaagataataaatgggtattgttttaagctgctaaatttgtggtaatttgttatacaacagctgaaaatgaagagaaggaatagttccttctgtttatgtttggttggctggaacttgtaacatggcccctctgtggtacacctaagagaaatggaagaaggcaagtgtagcctagctatgtgcccaggatgtaaaagtgggtttttggttaaaaagctagcagttttgctattactggtgcctataattaattaattgtgtgtctgtatattaatctatttgtgagcttgtaagtgtatgtatatgtgcatatgtccatatgtacatacacaacatacatatgcacatatgaattttaagtctagtttgctgaataagtcttttcttaatacataaggctcagtatgttccatgtgccttttgaaactgtcgtccaggctggggtataatggggcgatcacagctcactacagcctcaatcctctgagcccaagcaatcctcccacctcagcctccagagtagtgggactataggcgtgtgccgctatgcctggcccatgtgcctttttaatatattttttattttatagatttttttctacagtgctttggctttttgatatttagatgtttttctctgatgaggcacaagtttatttctgtggctcctgatcagttttttttttaacagtggcaccgttaagtacttgctgagcagtaccttagcctggtgggctggtggaacagtgacaacttctctaaccttggaatagagagactacagatctgcaaagaagtttctgaattcttagtctctgacagtgtggcagggatttcagttagagtagaggagttgactgttaatcctgcatctgtttttgtgcttgggggaaggctgaggccaacacagacagtgaaatgccttacttagtgcaggcacatcggatggctacatggtactttgaagttgttcattaagttgttgaggattgcagatttgtgtagcacatttgaagtgtgttgtggtgtaagcagcagggttgagggtggttgtgggccccgtaacatgtgggccattgtctgtgatccgttagccccatgctctttgacgtgattcatggatccttagccctgaatggttttctaggtacatctggtagacggtgccagacataatttggaaggcatgcggtctggcaccctgagatatattttagggacttggtgtcagttgagcagcttggccagggagagaatagtgaggcctgattttgtatctgagtggtaagtaacctgaaggagaggtgtcctgtagaaattgcagggtggacacacctctcacttctgttattttctgcatatactggttgctgaggtgaccctaatgtgcttctttctattgagttaatgtgtgtacagtggcttgatggctgaatttataccattcattattttactgcttaagtggctgcatctgggcaagaaggacctacaaaccctttgccatggccattgcacatcatcatcgtataatacactggctaaaggaagtgttttctggaggtgttcatcagtactgtagttaagagtttactgattaatattaatagcctgttatccagagatcttctacttctgatgatgaaccttgcacttaagttctgtctcccatttcactttttagttaagtttaacaaacagtaaaactgttttccattattctcttttccattcatctcatccattatgctctatgtattttgggccatttgaagctgataaacctaaaatctttggatttttcaccttttgatcattatattcaccttaaacccagtccaaattttgcagatatatttatagtgctcatcgtccctatgttctagacatggaaagctccttttccctagctccaagaaaagctggaagaatgtcattctttacacaacttaaattgttcagaagatatttttgtgatcacaaaggtgtatttaattcatttttgttttattttgtttttgagacagggtctcactctgtcgcagtggcgtgaccacgaatcactgcaacctcctcctcccaggcccaagcctccctcctcagccttccaggtagctgggactacaggctcacgtcaccactcctggctaatttttttgtatttttggtagagacagggtcttgctacattgcccaggctggtcttgcactcctactcaagtgatatgccttccttggcttcccaaagtgctgggattacaggcatgagccgccgcgcctggctaacatttaattcactttttacaagctctttcagctactttctgtgtctgaagacacagacatgtaaagcattttgatacattttcaccaaaaaaatcaccttacataaaaggacgtgtcttaaacagaaagcttatcataaaatctctatatcaattgttttcctaaattgatgactgttacgtcttccccttttgtgaaacagtgagttatactgatattttgtgatatgtactggcttgccctttataatatctaaattacctaaattcttagtgttgtcacccctccagtgccccccaaaaaaggtcaacaggtcagagttaaattagcatttactcaggaatgggggttgcaacctggctagcagtcagagattgtaccacccgagaagggcaagggggctatttaaaagaacttatttagattacataaattgcttgtcacattatttcattggtgtattaaacaagtctttaatcagtagtagaagggtacatttgtatcagttattcaggaaaaacctatatacagagtgtttgtaaagattaggaccagttttacttgtattgtgtagtgctgagagcacggttgtttgtgaaggaatgtttttcacagttccttttcgggtctcaaagttcatcagcagtttaatatggagtagtagcccaagatggagttactgatataaagcctggaacattgctaagctcatagtgtccagtaaaactgtgtctactggttgctgctgtgaatgattcaggtgaacgtaggcattttctgtaggcgctttccacatgattatggtagaataatttgattgtttcctaagcgtatcattcagttgtatcttcatgacattttgtcaatctgtattcatgtttactgactatataagggttcaccagcaaaacagaaccaacatgatatgtagatacatgagagggatttattatgggaattggctcatgtgattatggagactaaatcctgcaatatgctttctgcaagctggagaatcaggaaacccggtggtgtaatacagtccaagtccaaaggcctgaggccccggggagctgctggtgtaagccccaaccccaaagtctcaagaatttggaattctgatgtccaagggcaggagaagatggaagtcttgcttaagaaaagagagcaaatttgctttttgctcttcccaggccctcaagcgattggatgtctgctgccctcagatcttctttgctcagtctactgattcagatgctaatgtcttctggaaacaccctggcagacacacacagaaatattttaccagctatctgggtatcccttaacccagttaagttgacacataaaattaatcatcacactgacttaatttaaaactgaatcagtgtaccattttcttaaatggaaaaatcactattaattatcatgcaaaacaaaattaagtcctggatactcttgcctgagtaaatctgtgagcttgaggtttattctgcctttgttaaaacaggagattaacagataagtagtagatattctaacaataccctgagatttcctccttcactaaattagaatggaagaagaataaaatggatattttaatttggggattcagtgttcttaaggaccatggtattgtgaaatatgtatttcgtctccctgtttcctcacagaaaaaaaacctctaaaacccatgggatcatcagggtggtaactgtcttttctctgctacgagatgaccagtggctggggactcctatagcttcaggttggggactgttcaccagaaagaccaatgtatgcttagagggttgggactttcagctccagcctccttagaggggaaagggggtgaaggttaagtggatcaccaaaggccggtgatttaatcagtcatgcctatgtaatgaagcctccataaaaacccaacatcacagggtttgggaggattttcagacagctgaacatgtggtggttcctgaaagaggatgtgcctggagagggtatggaagctccaggctgcttctcccatacctcgacctatgtgtctcttccatctggctgttcatctgtatccttttaatacctttctaataaatggctaaacataagtaagtgtttccctgagttccgtgtgctgctctggcaaattagttgaatcacaggagggagttgtgggaaccctgatttatagctgataggttagaagcacaggactgtgcttgtgactggcatctgaagccagttgtgggaccgagccctcaacctgtgggatctgacgctatctccaggtagtgtcagaattgaattgaattagaggacacccagctggtgtccagtggagaatcatctgcagaatgggttgctggtagggagaaatccccacacattttggtaaccagaggtcacagaaatagtctgtgctgggtattttgaggtatatatataataggagaaactgtgtttgtttttttcctacatccttacaaggacacaagaatgtaccaactgtcttgttcaaaacatggcccttcccatacataatttgactatggaaatggttgacctttttctgagtaccaaggagttttctgcctgtaatggggtatttaattatattttagaaaaaggaaggtcatttgtttagagcagcactgagtcatctgttctgtgcccgatgttcagaaaggaggtagacatgttctttaagagaagcttttgaagtaatttagaaaatggtgcaataccatccgtcatcaggctgtgtggcacaagatcagtaggagcccagagacttcacatctcctagttttcccattctgagcacttgtgagaccccagaccagtcactagtcacttgatctcaacttcttcctcctcacacccacattttctcagttgcacagctgaggtaatatggtcctgggcatgattttaggttctgacgttctgtgcttctggtctcgttcccctctggttcattatctactgtggctatagtgacttttctaaagagcaaatctagcattgttcttcttcttaaaactcttcagtggctccttatggctcccaggataggtccctctgaagtcctgttcaggagtctgaagtgtcatctgtgtcctgctcagtgatctgctttcactctcacactctaaatgtgctctgagttgtagctgtgctagttatcctgacaccttgcaattatgccatacgtttcttgcctttcaagccttcgcaccatgctcttccctctctgtggaaattcccttctttccacttggtatttgattaatcaccactttatcagcttcatattttctcagagaggttacccttccctcatttagtgtgggttaaatgtccttccatgtgcaatgaaaattgcatgttgtgggagaggaacaacacacaccagggtctatggggcgggggtgggagagcatcaggacaaatggctaatgcatgtggggcttaaaatctaggtgacaggttgataggtgcaccgaaccaccatggcacatgtatacctatgtaacaaacctgcacgttctgcacatgtatcctggaacttaaagtaaaataaaaattaaaaaaataattgtgtgttgtacctctgtgaagtgtagtgctcggctcactgctatacaggcaccagtctccttgatggtatcctctagggtgggtataaagagaaggaccctgccattctatacttcattctgttgccagttcctagcctgtagtgggcatttaattgataattgttgaatgaatacatagcttctgtttctgttgatccttatgtatatttaaaagggggtcctatgcatatatttttgatgtattcatttctgcttaaaatacatcaccgatttctaaaagttaatgtagaatttaaagcacaccctcataaaattgtaagattgtaagtttaaaataaacttccttcattgtacaaatggctagcctaggtactattttaactcatttattactcacagcaaccctatgaacattattatccccattttacagatgaggaagctgaaacacagaggtggttacacagcttcagtggcagagtcaggattgaaaccacaccacctggtttcagagccagtaactgccagtagtttttaaccatgagtcctattgtcaccttatatatcaaaccaagacatacctaaaagctcttagtggtcaccaagaagacgcgaacactttagtagaaaaataagacaacaatatgaaaggcagtatttgaaagagcaagtggccaagatacgaatgcaaaaatcaaggaaatcagacagcaatatctgacatttttcattgtttagattggcagagatgaaaaggatagtaacattctgggttagcaagagtataagaacatggatccccgtttatggtgggagtgtaaactgttaaaacacttctggagatcagtagttctcttccctgtaattctgtttttaggaaactattcacagaatataaatgtataagtatgtacaacttaggtacaagattgttcactgtagtagttattgtggtgaaaaattgtaaacaacctcaataagggatgaggaagtaaatctgtatgtcaatattatgaaatctctacagctattttatctatagggcaatatttattgcagtagggaaacattcatgattattgccaaaatgaaaaaagccagccataaagcagatatgtaatatgtagtaagcctgatattgtaaaaatatagctatgatggtagctaaaatgcactgagaatttatagaccaggcgttatgctatattgttacagtaagattatttttttaatgaacatttgaacagtgattattcctggtcagtgggtttatgggtgagtagtgtttctatattttctttcttatctttggtaatttgatctattacaaaattttctttccacttcatcgtctttacttgtaaccccactttctcaggataagttgaaaacaaggaatcgaataattttaggagccatcacggggactaggaacaaacccagtttctagccaagttctagaactataaatatatgtcagtttgcttcattaggcatttagcttaaaactattggaacacctgccctgccctccatagagccctgaattaaattgtgctgcttgggtttcttctgaatgcatggctacttttctggtttcaccaagaagatgtgtacaaacattataagtaagcagctgctaatgacttttgctggcatttcttttaaatgaagatttttttttttcagttccctaagtcttatccctagtgtcatagcattgacactgttttttcgtaaagggaaagagggcagctaagacatgtatagggtattggagtgctcctgtaagatgttcttggtaatttggtgtgagctgttcagcctcattctccagcccttaggccacgagtctcctgggcatctgtcacttcttagcttctcagcaaaaagcctgtaggcagtgccattctagcaaaaaaagaatgaagtgagggagagatacctgagaagataggagacgttcccagtgatccctgttgaacttgaatgcggaacattgttaatagtctctggcaggcttctattttgaagacagaaaatacaaagtttaggaagccataaatggtaaaataatatattcttctcagcaacccaaacaaaatacataaaaatggaaaaaacactaccgtgaaacgtagcctcagtaatgagatgggcaggccacttttgcctttctcccaaagaggacacgtctagcaagatccactggactgctgacggtggtggattgctgggcacaagcatgcctttatggatggtctggctttctctggggcctgccactctttgatggcttcaatggcaagtgcttcgacctctgagataaataatttctgtgaaatcatttctagagtgaagctaacttttccaacctctgcagcatcttgtgatgtttctggggataatattaacttgtaagctgagaaacagttgagactgcttcaagagatttgttttcttgtgtagtaatctgctgaagcatataccaaattgatgtttttatttgctgcaaaacttcgggttttggtccttttaaagtagtttcagatttcagcatttaaaaataattgtcctggcacagtggctcacgcctgtaatcccagcactttgggaggctgaggcgggcagatcacttgagttcaggagttcaaagccagcctgaccaacatgccctgtctgtgctaaaatacaaaaaaattagctgggtatggtggcacatgcctgtaatgccagctactcgggaggccgaggcaggagaatcgctttaacccaggaggtggaggttgcagtgagccaagatcatgccactgcactccagcctgggcgacagagtgatactcagtctcaaaaaaaaaaaaaattactatataacaatgattttttgaatgaaggtagatgtagcataattgaactttgttacttatgtattctgtattatgtgcttgttaggtggttctcttaagagtaagggttttgcaagatgcttctttcataattggacacaacttgtagaaagtgaggtgtgagtttgtttgatttatatgtttttcttatcagattatggaactatccattaataagctactctagaaattatttggatttaaaaactctctttggagagttgcaagggcctgcctgatctgaccctggcctctccaccctgattgagggccagtttttcccctctttatgctctggtcctccatctttcttaacaaacagtaagcattcgcccattaaccgccaggctctgtgctgagttttaggtatagagagatggataaaatactcattccctgcccccgtggaactggcagtgcagtgtgggagacagaccaatgattatgcaaatatataattagaatttgtcacaggtgcagcaaagaacaatgctagggcactctcacgtggaggtcatacctgacattctgttgtggagagaggccatgttcttttcagtatgtagaaaggttaaggttgtctatgaggtgcagctggggaagctctcaccagctgacgtcattcaaaaagtgaacagggtactactatttgcacataaaaaagagcaggttatggtttcacagacactttagattcttattcagagaggatagccttgagggtaaagaactacttctcatgtcttactgaagctagggtcatggaacatctccagctggaatagtttctgttaaataagattgtatgatatgattttacatcattatctttcttaccaaagatcataactctgtctcacagaaatgtgtggtcatgcagtgtttccctgaggatgcgtctttaaactgagaaattgaggctgagaagaaaccaggcctttgcagagttgcgggccaaggggtttgagcccaccccccgacctgcccacttcatgtcatctgggagctagtccactcccactcatcctttaggccttgatccagatgatacttattggaatccctttctctgacctagtaggttggatcaggttccttttattacattcaccatggtttgtgattgtgcattaattttatggccattcgattaaatgcctgtctccttcagttggtctctaaattcctgaagggagggatcaagtttctgctgatctcttggggtagttaccattatgcccattttactgatgaggaaactaaggcacagggaagtgtagtgactcatccaaaataatacacggtattaatggtggaggcagagtttgacactggcagtccatcctttcaaagttggaatagactttaaatgaatcatttaattatttaattggtcaatggaacaaaatggaaagtccagcaataagtagtacattgtggtgatttggtatacaataaaggcagtatttaaaatcatcaaaaaagaatagattatttagtaaatggcatttggacaattagctattcgtttgagaaataaaatttaatcctttttgtcacatcttaaaataaattttaactagttggaaaatatgaaggtaaaagagtgtaaaaagaaaatatggtttcttttgaaatggggaatactttctaaacataacatatcatgcagagactgtgcactatggatgaaggctggtgaatttttgctacttgtaaaaatgaagaactgctgagtagcaaaggatcctaaagatggttgaagtgactaatgggattaagatttgcagcatacaaataaaaataaaatttacaaaacccagccttggcaagggtacagtgccaaatggcactgtatttccagcaggttcttctttctgggatccagttaggcaatatgtgtcaatatgcagattccctttgattaaggtacttcttgaaatttatcacaagtaggataattggggatgtgcaaagatgtatgttcaaaatttattgctgtgttaatggtagtgaaatattggtccagtcatatgatggagttttatgaggcaaatgatgtgatctacattcacatggaaacctttctttgacgtgcttacggttgggggacagattctagccaggcatttgtagcatgaacccatatgtaaaattgtgggtgtggcctgtgtatgttcttttggatgggtggtgatttggaactagggtcacaatgttaattatctctagatgtgggctttcaaacgttttctttttcttaaaattttttttgatatttcctttaaaaaatataaacggtgaatatatacctattgataataaacccatccaggaaacgggaataaatatctaagactgcctatcttttttttttttctaatctgaacagttattttgcttatgaaatataaaattaggacactttgtcattttgtatttaaattcttataacacttattttgggctcctatacatgctcttcctgcgtttggctttcctagccactgtagttgggatgtttgaaatattcagggtactgaacagcagtttagacacaaaaaagtacctgggtgcagaagcattttcattaaaattacatgaacgctggagtttattctacagcacaaagccttcctggatgaactggattaatgtttgatagaaacacagcctcttaagcatcaatgttcttaaactgtttgattattaattaaatgtcctatgttcttcagccttaaaaggtaggagaaactaagacaaaggagaaaaaaatcaagatgtcaaagacaggaatgtaatgtcgaagggagaatttcaaataacccacctccacacaagcctttctcagggagacggttaaacagcacagctggctccgattctgatgttttctcagttagatcttcagagaacagttttaataaagctttaattatggagcatccctacacacactgtagacagggatcattcagctgcataatgttgctgatgatatatttatggaatgctatttccatcctagtttaaggtatctgttgctcttagttactggagctatgctgatttcagaactacaaacagtttttaatattgaacatgctaactggttcaatgtatatgttgtactactttagtttttgtggggaatggactttaaagattagtttcatgctgatccacagtgtgggaacatgtttggtatttttaaaaactctttactcattgtctgaggtgagaaattgttggaagacagagcagaggggagaaagagatatgttatttatgtaggtgaaaaataccatgtgaatttagagtttagagtttagaatatggcaaccttaatgaattttggagctgcagtaggtaatggatctctaaatttttttctgcaatttttgttgttatccattagctcagtgacaatcactgtgatcccctcccttggtcagtgtgtccctcagcattcttaaccattgtgtatgtgcactaccaagcttttccctgggtgcctcatgtgtggtggtgtttctacagcttttttgcagtgctcaacgtcttcacctaataggtcacgtggtggctgtgcctgacctgcacatggtcatttctttttggttgctgaagcccaggttgtcttaagagataccgttgtttttctttttctttttttggaatcaatttttttttttactaaaggacatacagcaagatgggtgaaaggtggaaaaaataaacacagggcttaatgttgagagggtatttttagacttagaagcagcttgctgctttccatgaaatagttgagtgtaattcatgactcatgtttccgtttttggtggtttttctttaaaggatgaaggctggattaactgtgtgtttgtgcgtgcctctgcagtttggttctctggattcataggagtgggtttcttttatttagtaactatgtgcataatttccttttgtcctttgtaaaatatctttttagtcataaaaatcaaatcatcttcccatgtaagcttcagaaaaggtgaagttatatattgaaacaaaccatgacagtagttaaattttttgtagggatagcagaggaagccagtgagtggttcaataacattgttaattttcaagttctctggaatgcttaaatagagctgaagtacgttttaggtcattttgagttggtacacttttgttggtgacttgttgtgtcccaaaaacttggggtatggtcactggggaagagaatcctattggtgggaaatcttcatctgtctgtggtgggtttgatgctgccaaataggtaaaagtaattacaattctggtagtatgaaagagaaatggtcaagcttgggagtcatggattgtactttggggctgggaatcttatagattgttcatatatggaaagcattttaagggcattgcagaaagccttctggttgaacttcatgaaacttaactcttccttcccgactgtctctcccaccttctgaaaaccacagaaacagctctatttattgggttctatgacttaaaagaagaaaagactgaagagtgacaatcagacgtctttaaagttctcttttggacccaaggcaggatgctcgtggcatttcaacaccttcctcaggatcagagtagggagagacagaaatgatctttatttttgggatcacagcttgaaatggggctgctgggctgtattggatttgattctgtccaaaaggcgaaagtaatgatagctgctgggctcccatcctccatgaaaacccagtcagttcattgtcagtttaattgttgttttctgagctcttctgttttgaacatttttaaaaaagacttttgctttcctctttctaagtgttttgtatcataccccaatgcagaggccaccagccaccttgcctctttcacccccatctccaggagattggcaggtctaatggctgtcactgtagaacagaccttccaggtgactcttgacccctcaaatgaggagtaaccggatcccatgtagacctggcagtataaaaaaactttaatattattgatttgcaaaagaaggattataaacaaaacgctaacaagacagttgattgtcaaattttcctctttatttctccatttttggggaagatggagtgggaataaggtaggaaacatgcaccaaaatgaaaacatttcttgtaggtgagaataacaaggacttctatcactgaaacattctctttttaatgtttaactgcaggatgcttaaagaaatcctacaattattgtagacattgatgtgctatcaagaaaaatccatcttaaatcccctgcaaagttcattaaaatcttcctcattgtggtactttacttgagattaatttctttaggtagcatgtttttactttagttgtagcaaagagccacatttacaacaggagcttgggcccagtcatggaacagtgctgtgtgtgcacattctgtgggactgattctgaggacatgccactgagtcttttggtctgtgttggagaggtcaccttaattccagagcagcaaagagttttatttatgagaaatatcctgatatgttaaaatatgtttttgaacatattttggatcaatttgtcttattaaaaagccagcattatttgtatgccaatgttccttgcagcattattgaccatagtcaagaggtgggagcaacccaagtgtctgtggagagataaatagataaacaaaatatggtagatcctgccacatgctacaccatggatgagctgtaaggacattaagctaagttaaataacacagaaataaaaagccaaagactctgtgatcccacttataaggtacctagagtagtcaaattcatagacagaaagtagaacagtggttgagaggggagggcaactggggagttgtgtaacgggtacagagtttcagatgggagagatggaaagagttctagagatggacggtggtgatggttgcataaaacatgaatacacggctgggcgtggtggctcactcctgtaatcccagcactttgggaggtcaaagcccatgggtcacctgaggtcaggggttcgagaccagcctggccaacatggagaaaccccatctctattagaaatacaaaattagccgagtgtggtggtgcatgcctgtaatcccagctactcgggaggctgagacaggagaatcatttgaacccgggaggcggaggttgtggtgtggtgagctgagatcgtgccattgcactccagcctgggcaacaagagcgaaactccgtgtcaaaaaagaaacaaacaaaagcaaccatgaataaacttatgccactgaattatatatacacttacaagttaagatggtaaattttatgttacatatattttactacaaataaaagttaaaaaatagaaaaaagggtgagtcagtctccgatatgttgtttttagtttctggtcatggtggggtttggctgccctggtcctacgcttgttacaaaactgctggtgggaagggtccttagacctgtcatctgctccaacactttcacttcatacgtgagaaaactgggtctcagaagtgaggtatttaccccctcctgcgtgggcttcttccttcagtttcctggagaggctgtgcaaagtgcagcaagagctggacactggactctgctgcctgggctccactctgctctgctgcttactcgccaagtccacacagaccgttaacttttctaaacctgtttctgaatgtataaaatgggaataatgtcagtatcctatgaggttgttatggggattaactgagtgaatgcattttaggtgcttagcatagtattttcacacagtaagtaacacatgaatcttagccgtttgttattgctttgttattgctgttgttactggcatgtgctgcaaagagcctttagggacagaggtttgggattgaggctcagtggcaattacttgttagttctctgtccttagccatgctgcttaatttctccttgttacccagtgcatgaagtaaggatgggtgaagcacttgtcttggtgtggtgcttgtgaagagagagagtggagtacctgacagagcacttggtgaatggtaatgacccaggtcagttttagtgggtaagaggatgtcactgcagcctggagggctggcatctactaaggcgtggtcttcaagggcggtgctgagaacaggcatgctcagctctgaccttgggttagggtggaggtgtgttcttctaggcccgctttctagggcctcctgagaaaggggtcaccggacttctctaggtcagttgtccctaaaagtaggtcgaggacctgcaggtagagcctggtatagtttgagtcagggacagaggtattagtgttctttcacaagtcatttttttttttttttttgaaatggggtctttgtgtcccagactggagtgcagggggacagtcatggctcactgcaacctcaacttcctgggctcaagtgatcctctcaccttagcctcccgagtagctgggaatacaggcattcaccaccatgcccagctaacttttttagaaaaattttttgtagagatggggtctttctgtgttgcccaggcttgtcttgaacacctggcctcaaatgatcctcttgtcttggcctcccaaactactggcattacagacaagagctactgcagtaggctacagttacttttgtttccaatcccaggtaatagacatcccctcactactgactcatcctcttcctgactgtttttcactagcttagccttacctacttccagaggaagacttcatccgaaattgagatgaccagggaggtcatttgtgctcaagaaaaattcatctagcaggtatgtattgagaaccagtatatgataggggtaagaggctagaaatataaagggtaatgaaatgctgctgacatgcaggggctcagcactttcagtatatagtcctagtacctgagagctagcaaaaaacaagcagagatgtttctcttagcccaggcagctcctcagtgtgggggtctggtgccaacattgcaactgtattgtgtattatttaaatgtgtttgtatgtttgtgttcagtgtacatatgttttcagatttgtgaaaaatacataataaactgcatgtcataaaattcatggtgtgagatttgtcatagtctattacattcctaaagactctcaatattgtggacattcaaactaaatgattccagaatgactttaaaatgctagtgtcagagcaggcagtagggatgccttcctgtatgggtgtggccatattcacctgtatggggcccaggcagtaactgaactgatagtttcatcaaagtcaacacgttattttttgaactctgacactctatgcttggtatgcttgagcacatgatccctttcattaatggcttatttttttcaagtagtctcattctacccttgtcaaccttgacggcggggtcagcttcacttgcgtgaggtttgtttgtttgtttgtttgtttttgagatggagtctcactctgttgcccaggctggagtgcaatggcgtgatctcagctcactgcaacctctgccgcctgggttcaagcgattctcctgccttagcctcccgagtagctgggattacaggcacccaccaccacacccagctaatttttggagttttaatagagacgaggtttcaccatctcggtcaggctggtcttgaactcctgacctcatgatccgcccgccttggcctcctaaagtgctgggattacaggcgtaagccaccatgcccgctcagaccccacaactcccaaggccaattaaaccagaagcttcccaagtgttaccaagctgcagcctggcttgggaatcattagcctatccaaaagtttgactagtatctcccttcccttttgattgatatgaatgatgctaatcttgcttcgatggtccatggctgtaccagttcagtttcttctttgtatccatcatgagagatctgatataggaaacaaggctaaaatcaattttaaaagtttctacagatttacttgatgttctctgatgaagtgaagctggatatcctttaactacctgagctgcctgccaccttctgttttctttctctttgctaaattaggggagtaaaggtgaaacttaatgttagttgttccatatcctgcagtgctgaaaactaccacaaccaagaaataaaattacaaaattcaagatgtattttggctagcttcactctttgtccaggcagcttcagtgaagtggcaatttagaaatagacggtcagcagtagaaagtaagaccccacttgtgatttacccaagttctttggaaagatgcaagccctcctgtaaacacacagtgattcagaggagcatgtttactagctgaagccctttttttctcctcttctcataaggccggttatcgagggagtttgtgtgtctggggaaaggactactttatgatagttccttaaaattatgacatacagtcatgcatcaggtaacaatgggatatattctgagaaatgcatcattaggtgatttcataattgtgtgaacatcctagagtgtaatcacacagacctagatggtggagcctgctgcaaacctaggctatatgatgtagtccattgctccaaggtaatgaacctgtacagcatattaccatactgaatgttgtaggtaattataacaccatcatagcatttgtgtatcgaaacatatttaaatgtagaaaagatacagtaaaaatatggtataaacgattaaaaatagtataactgtacagggcactttccatgaatggggcttgtaggactggaagttgcttctgggtgaattggtgagtgagtggtgatgaaatcatctaatcagttatgacatagctgagtttttcaggtcttataatcttacaggactaccatcatgtatttgagccatcgttgaccaaaatgtctatgcggcacgtggctgtatttagctgaacgattaagtagaaataacctattaagacctttttccaaagtattttttacatggttcattgttcacattctgtatatatttacatcatactgtatggtctgcaattgtatttttgactttttcttcaaattttgaatggctaaaaattccagcagggttcaagagcttgtcctttttgattgtgttttgtttcatccgtagcagaattgcctagattgaaatgaaatgaaaataatgaatggtatgacacttggtatcatcacaaactgatcattcaaatgaatgggttaaatactgttcatgtcatgatttatggaatgctttcctgtcccaaatacttgtgcttggtgctaggcatacaattatatgaaatgtttattatggtgaagaaattcaagattttccttcaccttacctcatctgttcaaatgaaaatgggatctttgtgtttggggggctgttttgcacttgtatatataaacaagtgaggaagctggatatttaggaataaaatctctttttgaatttagaatttgtaagctttcctcttttttttttttttttttgagatggagtcttgctctgttgcccaggctggagtgcagtggcacaatctcagctcactgcaagctctgcctcccaggttcacgccattctcctgcctcagcctcccgagtatctgggactacaggcgcccaccaccacacctggctaaattttgtacttttagtagagacagggtttcaccgtgttagccgggatggtctcgatctcctgacctcgtgatctgcccgccttggcctcccaaagtgtaaactttcctcttaacggtcaaatcttactgaagaaatctgttaatggaaactttgataaatacaatgaacagatttggttcttcctcatccacataggttggaagcaacaagtattttgattgttgactcatacttctccagtgaagtgacaatgtgttgatggattaaacacagttatttttaagctgctttgacattctctaggcaaagtattatcaggaacagagccctgagatttgagagttgcagatgctttcatgattcttcactgtctgtctctccttacataagtgtttccagaaagctaataaaattattcctgaaggttaaaaacaaggaagttatgaaccggatttgaggttgaaattaggtagggggaacatgaattattttctgtaacgtacaagtggaaacaatttaatcaatcctttttatttttattgaatgtagacagaaaattcagtgcaggtggctgcattgcatttcatttacaataattaaaaaatgtttgagtaaaacagctctgttttggtggacagagatccaggacacccactttcacttacaggtgatccgctctttcactgatcccagcatctgctgcttctgtgtcacaccgctgggggaatgggggatccagagctgatgaaggcatggtcctggctctgctttgtccagctagtgacaatgttagtaacccgcattattgagcacttaataaacaataattctcacagcccgataaagtagttttttatggcatcctcatttttagatgaggaaatagaaatgcagagatgtgatagcttgcccaagatcagtctgtaagaggtataattagagtttgaagccaggtagtcagagtttttttttttctggatattttgcagagaaagtttgagacttaaggaaagagcaaagatgctcttgtgtttaagcagatccattgagcactttttgggtcatggtctctgtacccataaaactctgaaaagtacaggggttgcaaatcatatgcgtgcgtaagccaagcaggtagaatagaggcatgaagttggccagatggtctgtggtgagcaggggagctctccgtggggccacctccctgcagctgtagccagtgagaaagtgagcccagtatggctgatctctagaagggaagctaatgaaaggtttaacaaaacatctctgggtcataaaaattgatctttacatcacatcaggtttgtgaatatacaacgtgaaacgtttagatatgtacttgatacggctttggggaatttattgagaatgtgggaaaacatttgttctctaaaagaaagttgcagatcatactgcaaagtgacagctgagcaaaggctcccccttgagaagggcatgtgctactcagctcatggcatctgggctctcattgataatggggggtaggttggaagattcttggaagccacagcaagacacaccacacctgggctctcataatcattttgccaccctagagagctccagacacacgattggccctctaacagaggaacattttaatacaagtgtgtactgctcaaggactcatttgctaagttaggggcagactccttggtaccaccaaatcctatttttcctaaatcggtcaatgtattgtcatatcccctgtgtgcagttttaactctgtgagtctggatttgaatggaggcccagctttattctagctgtgcaactgtgggcaagttccatcttctccaaagttagcttcctcagggtattgcaagaattaaatagcaaaatgcacataagtgtctggcgtagagtaagtgatagcttcctttcttttcctcattttaatcaattacccagttggtggatgtgataacaaatgaacttcctgaagatcagagctgtgtgttagtgtagggctcagatcctctttatgtattcagtgaacactatgttctgtctaacaggcacctgctctaggttattagggccattaaaggcatgttatattctcaaagagtatacaatttagtaagagacacagaaaaaactgatgttcgattgttaggttggtttaagttgttgatacatacttggaatgactaagatcattgtttaacattggtgagtgcacactgcaatgggaactttgtaatgctggagaaaccctcaactgttaaacatatacttaaaaaaatcagggtgtaaggatccctggctgaatagtgttgaatttttttcattttcctttttttgacgaagaagtttaacacaaaattattaagcaaagccattcaagaagtacagcaagttttctaaagttttttttttaataaaagcgaatatcttctcctataaactagcttgctgacccagaaattgaactgtgattaaaaaatagggcagtgccccctcaaaatgagagttgtcttatgttatgggacgcttttttggtgaatactttatatttagtaatctcgtttttaaggttgtaggctctgtatggtaaaattaatacagtgaaaaattacagtctgaatatagagaagatgtgagtgccaaagtgttaaataaaacccttatttcttcttagtgaaggttctttcaattgacaattaactggatttttctatatttctctgagagttattcattgtgacagattttgtttcatgacagatgtaaagaacttctttaatttttgatgttcatagagtagacgtcatacaataataaccttgcaaataggaagtatcgatcattggttttttttatttcataaagcctaacaattattttactatagggaaatatacaggttgaataactttatagttttcatgatcatgaagtaacttccaagttatttcatagggtaaacgtgggtacgtgatagacatataggacattttggtttctttttttttcatttttgcttttggttgaaattgttcgtggaagctaaaatgcattctaaggtgaaataaattttcacttatccttggggcattacaatttaatagaaagagaagctcatttagaactttattggcttcagttccttctggctacagcataatcagagaccttgactttccatgtcatcgcattggtgtgtttgagatgtgtgtgacctgtatatgggatgtatctgagactctgtgactggtaactgaggctccctgttactgagttcatgatcttacattactgttttcatgagaagccagtggatccctgagacatggactaaagcttttaatgcctctcagaatatgtctggttaactttggtcactgcagtcttcttactctgggggccttgcccttgctacaccccgtcaggaggagattagaggtgatcattgccttgggctctgtcttcagtgccaacagaaggagacatcaggacttgctggccccaggtctgcccaactcctcttgtctttggtgcccattatgggaatcgtaatgacaacttgcctatctcaacactctttcccaccataaagtaatagaatgctttatggttctgtaagctctttttgtgtgcatcatcttctttcaccctgaaaatgactttgtgaagtcagtagctaataatattgggactagttgtgcatatggggaaattctcagagagaggaggtgcctgggggaaggttgcctagcagcagagctggcatagaaggcaagcccgtgacctgtctgtatgggggaaagtccggctcttcaagggtggcattgcctgtctgtcctctctctctagttctgtgcacagaaggaacaggaacaggaacagaaggcacagaggaacagggaggaaaagcccttccgggagtgtgcctgagtgtggcttgtggtgaatttgtggtagtagctctggtcagattttacaacttagaatatgttttgaatccatatatgtggtacactctttttgtgtgggactgacacaaccctcttaaccttaccacatctggaaacttgcttgaactgctgaatctcagaccctatctcagacctaagagtcataattgctcttaatcaaggttgtcaggtgattcttatgtacattaagtttgcaaaatgcagctctattgaaatacagaggaccagaaattgtataattgagaataaggtgaggagaggaaggggtgcatgtgtgtatgtgtgagagactgggaggatgcatttcacttgtgtatgtaattgtgggagtgtgttctcattttacttgaaaaagcagctcactgagctataattcacataccatgcagttcacctattgaaagtgtactgtttaaaccacttattggttttaagtgtgttcacagccttgtgcacccataaccgcaatcaattttggaacgtttttacacctggaaagaaaccccatacctataagcagtcactcaccatttttccacagtgcctaccttgcttccgagaagcccctgattatcactaatgtacttctgcctctgtcttttggatttgtctattctggtcatttcttgtatgactgaaataatacaatatatggtctttagtgtctgaatttttttcacagtttatccatcttgtagcgtgtatcaatgcttcattccttttttactgctgtcattttgttgtcaagtttattttgagcaagaatacagagattcacctttatcctaagctttgatgaccttaggctgtctaaatacggtcttttattgtacaataacattcaataagagtaatttcttagtgtgaccattgcttttctgatgccacgtactctagaatctgaaaagtgacagtgagatagtagaagtattgttaaatgcattcaattaaagaagcaaaacattagtattttccatttgtaaagttttggttgttaattttcaaccactttctctgtaaaaagcagtggtatgccatccatgctctgctgaaaactatgcgtgcctttataaaatatggagctgatgttgctgaaaattaaaatgacaaaatattgtgtttagataaataacaacaatggcaatatttttggcaagaaatcacatattgtccctcccccaagcagtctgttccctgcaattctgaatgtttggtaattctaagcaccctagaggaaggtaacattcttcccttggtgtcagtgctaagctctgagattgttatttgtcaaataaagcacaaatgtgttttcctctagttacgtgaagaccttgtgtggaatgccttactgtttggagaaaatcttggtttggctcttgggctctctggtgatcattttataatgctcattatgggaggtgacgggaagaatggccagcaagatgctctagcctgcagaaaagtcactttagcatttccctgctttgactatggcacacggacatttggaaattcttattctggttttggcaacacaaaaagctttcctttttccccttccctcctggctgactaagctcatcttaatgccactaaattaccaatgccttatttggcaagctgcctggtaaatcaaatgaatgacgacaatactggagatcttgtgtggtcactttctaaagggttttgtgcctcctttatactcttgtctccttctccttctttggcgggtccactcagttatttggctctgtttgggaaggctctgggaaaaatgccatttatctatcttttcaacttgaggggacatgctttcttcacagatttctttgggatggaaagttctttctttaacctgattactgtttctaggtgctgtaaattgctgatcattctcagtaaatcaccagcattctgttctttctcagtcttgacaaagttgccattgtgcatatgtgtatttgtgtgtgtgtgacagggaacatgcatggtttctgaaaaaaaaaaaaaaaaaaaaaaaaaaaatccttgccccttttagatttggaaattagcatagctaggctagccagatccctcttttggaggaaatgggaaagattggattgagcccttgtgtcaaggaaattgacttggctggatttcagggatccctgtggactggcccactaaagatctgtgtcagtatctttagtggcactggaattgggacagcgtagctattttctgtcatagggcaaactcagggggaaaagggcaggcacccaacattctatgagaacttccatgtgtcagagagtgttatgtaaatgctatgtatattcttgtgtagtatgacaaccttgtgagctgtatattactactgttgttattattaccatcactgcttcacgaatggagaaactgaggcccagggagatcgtatttcctaaagttctacagctgagaggtgggttgcggaggctgctgtccttttctaccaagtgaagtttgtctttgctctttctctgccatattctttaaaggggcagatgttacaaggttgatgcggctgatggaaacactagcataggacaaaaatacaaaatcccttcacagactcaagtttccccacacccaaaaggctccgcgacagcatttccaggtataggggcaagcttctgtagcctccagcaaccacagaggtgcccagatgccaatgacaccctgactagagtgagcatgtcctctctgctctcagagtcctctgtcattggacccctcccaactgctgtggacacttgggctgtgtgctgcctactcccaggtgttaagttactggtaggacccacggctgtgtgtttattgcacaatttggtgaatcaaaggctgacttcctggtgagcaccccgtagcagggtgagatatggacctttctggagtctgttttacaagaagtgtttactgggatattttaggaattctcagataaatccatatgatagcctacctgtatttcctatgaataaattgggtatttaagatgtatattcttttcatttgtcatttttccttgattttaaaatttcccttcattggctgggtgcggtggctcatgcctataatcccagcactttgagaggccgaggtgggcggatcacgaggccgggagattgagactatcctggctaacacagtgaaaccccgtctctactaaaaatacaaaaattagccaggcgtggcagcgggcgcctgtaatcccagctactcgggaagctgaggcaggagaagttcttgaacccaggaggcagaggttgcagtgagccgagattgcgccactgcactccagcccgggtgaccgacagagcgagactccgtctcaaaaaaaaaaaaaaaaaaaaaaaaaattcccctcgttaatatgtgtttattgttaaaaacttaggacgaaagttaaaaaaaaaaacccacactacttaattacagagatcttcattaacataattctgtatttattttctataggaaaatttttaatgctaactttctagaactcagtcaaaaactactgtaatcattttaatcagctgattaatttgctctagcagcttaaaatgtttttgctccattttactttttctactgcatgatagaaaaattgttgttctgtgaatgagaaagttaaaatttgtgctcaatggcaggaccccagagagatgtttctgggaattgagattcagaggcagcctgcattcagctttcttcaggttacctttattaatgatgcccttgatcagtaaggtggattacttacccattaacacttattctacatcagccttaatgttttagggaaaatatatttactaagctgtttgtgtacaggagtatcacacagtagatgaagcacttatgtttctggaaaaaaagagataaattaggaagctttcagatttgtttataaaagaaatatgaggctaggaaagaagcatgatgacttttgtgatacacacagtgagtcagcaacccattttccagaagttagcagctgcatttttttccattgagggcaaaacataatatatgggtataactttagtgctagctaattacttctattggtgcttaaaaaaattaaaatcaacaaggagaaatctacccaaactgatccaatatacactgagctaatgaaggaaggtggtgtactttttgtggggtagtatttttattttgattatgttgaagtggtagagaaagaaggggagagatctgggggtctgagagtcagaggaggctacaaatgatatagcaaagcaaataactagattatgaatcttttgaaatcatgcaggggaacaaaatattgttactgccttatcaaaaagtattttctcctgtataatttaaaaaatcaagaaggtgtcaaccttaaaaatcgtatcattgaatatagtaagtccctttttttttgttaatatagcctgttggtttagtagatttttgcatcttattgtctgatttttataccatacagactaataaaaattagtttatgcacttatttgttacttttatttctgaatagataatacagtcagcgtagtataaaaggttagacagtgatgtctgaattctactccttcccctagctagtttccttcccagaggcaaccattgttactgttaccatgttttcctaaagacagttcctgcaaatgttggcaaatctgtgtgtgttctctttccttgtctctgtgccttcctttcttttaggaatgctagcatacatactataatattctgggtctgtctggttgtttttacttcatgtgctctgtagattatttcagtacaccaagagcttccccattgtttcatagttgggtagtattctgttgtattattatgccatgatgtatttaaggaatatgctattggtggacatttaaaatgtttccagtttgctcctttgaacaatgctgcagtatataaagttgtacatatatgtaggtttgttaagaaataagtggaaacccatagctgaaagatggttttaggattgtccctgggaattagatctctatcattgtttcccagtgctccttggaaccctcctcagggaaataggcatcattggagtagaaggcaaatgggatttcatggccaaataaatttggaaaatgcagtgtccttgattattccttggagcttcctaaaataactagcatgttaaaggcttaacgtgctcatgtggttttaagaacaacaaaaaaactgccaaagataaattttcaggctcacttgagtatcacatatttgaagatgcctgttaacatctttcgagacagtttctgggaaaaaatagtttgggaaatgttgacctatgtgattactacctgtctcaccaattccatagatactggaaactagctaactgagttttcagctgacaaattgcttgcttttggagtcaagtgtcttgacatatgtagcttgttcacctctctggtcctattgcttaaagtgagaaatagcgtatttggaaggttgtatgtcaggaccatcttctgtttgtgagcgcgagagaaggtaggatcagatatcttgggtggagcccagtctccagctcaagacttgagttgtaaaaatcgtgttgtattgtgggacaaaaatcaagcagttcattttggctagggtttaggggatagaaatgggtggaggagagtcataaggctttctaaaataagctgcactacagcagaagttgcagttgggagttctgttgtagaaaatggagaggaaagcaatagatttttttccctccagtttgcattggttctcaaccggggatgattttgctttcctgctaaaggggatgtttggcaatgtctggagacatttttggttaccacgactggaaaggtgctaccagcatctggtaagtagagctcaaggatgctgctaaacatcctgcaatgcacaggacaaaaaaatacctcagtaaagaattatctagtccaaaatgtcagtagtacctccattgatatacccttctctaatgggattctaccagggttggagagttaggaaattgttactttcttcatacatggagaggagcataagtgagccatgtgccattctggactgaggtgccaccatggtgccagcatttgataatagtaaactcatgaccccttattcatagtttggaaatttaaaaaacgctggaaaatgtgacgtttcttcataattcagttagcagtaaaaccttgcctgtgttgatgtaaaggtatttatagtctttatttacctggttttgtgtgaatgttaatgcgcttgactgtagggtgctggcctagacctggcttggggctttatttagtaaatatgctgtatcactcttctaaagtttgtaacattctatacttggaaacactttggtccccaaaggtttcagagaagagattgtgaacttatatattgaactaaatttttgccaaatttggcttattttgtgtgtgtgtgtgtgtgtgtgtggtttaaggagttgaaagtttaatagaagaaaggagagaggagagcatctccttgcaagagagagagagaaagagagaaacgtctgaaaaagtccaaagttggcttatttttaaaaattcagcgcttttagtaacgtttattgatttttttaaattccaaaaatgacataagatcattttgaaaagtttaagtacaaaaaagtagtaatattatcaaccaactgtatggtacttaactgtgcgctagatacaattctcagcactttatgtgcagtaactaatttaatcttacgaatcccattatacctactttacaagtgcagaagccgtggcatagtaacttgctcaagatcccctagttgatggcagagctgggctttgaactctggcacagagaaggaagtgattcatcatctccacagctggagtgggctgctgtgtgtacatggatgtatttccttatagccttctttcagccttccctactcaactatatttgagaatttcccctgttgtcttaaatattttcaaaaaacctgattgttgaatggctgactacctatttaaaagaataggtgaggtggggcatggtggctcacgcctgtaatcccagcactttgggaggctgagccaggcagattacctgaggtcaggagttcaagaccagcctgaccaatatgatgacaccccgtctctactaaaaatacaaaaattagctgggcttggtggcatgcacctgtaatcccagctactcgggaggctgaggcaggagattcgtttgaacccgggaggcagaggttgcagtgagccaagagtcaccattgcgctctagcctgggcaacaagagtgaaactccatctcaaaaaaaaaataaaataaaataagtgagtgaaccataaattatttaaacattcttttgttgttgggcatttaggctctgtccattttttcacaatagaaaattgacatggacacatttatgtataaatacttatccatatctgattatttctttagagaatgttttaatggggctttttaatagactcttcatatatactgtgaaatgtaccagtttattctctcattagaattcattgtcatcagcctggagtgttaaatgcttttccctttgatttctgattctgtgatgtagtatcttgaagttttctgagaaaatcagacagatgattggaaatttagtatgattttttttaaattggtcaggaaacaagtagttggaataactgattttataaaattttatatttcaaaaaattcaattttagagccattttattttcagattaacccatgaagttaaatcaaggctccatttcacattgttatgaagagctggtagaaataaggatagtgcagcattaagagatactctgacctgaatcttactggtatgtgatcagtatatgcctaaaacaaccattcagtaaacatttatggaggatctgctacgcaccatacactgcattttgcactgggtatccagtgaggaacaagtgtataaaaggaaaaatagcaaatacttacacagtgctttttaggtgtcagacactgttttaacagcttacgcatgttacttaatttattactcccaacaaccctatgaggtagatactattattgtatccatttaactgatgagactgaagcacagagaagatgagtaatgggctcgcagacatgcaactactaaccaaggcaaaccactgactgtgctagtttggaagggcagacagaagagggttggtgcagtactctgggcatgagaaactggtggcttttgccaccagcaaattggtcaagcagtccagcaatgggattggagagaaatggaggcatcagaaagatttttcaagatagaatttatcagacatggtgattgaatgtggagggagagggagaagtcaagggtaaagcctaggtatcttggtatgagtgacctgctagatgatggagcccttcagtgagtccaggaacagtaggaaagaatgaggagcatgttttagattggtgatgtcagaggggtctgaaagggggaggtaagcagaggggcattatcttcaaaatatttggagtcagtagctttgaagctcaccaaatataccctggtagtttagttatcagaaaatgagtttttaaaaaatacttataatgtgtagttcatgagaaagttttccagcgtttaaagatgttgacagagtttcagttgattgctgtggttttcgtgtatgaaaaacatgtaaaatttgtgtcatattaatgcccttttgaagactaatttcaatgcctgtagacagctttctaatgtagttgtatcatgatttgggttatcaataatctgtgaatgtatagattgttgccattttccttcattgtagataattttacaatgaatgtctttatgcataaaacagttttgatatgcaggattatttctttggaggtatagctgaactacaatttccgaatcatacatatcacaaaattaacttctagaaagactgtgctaatttatgtccgcaactacgtgcaagacctgcctcttaatcagccattgggttgaattgtcctgatgatttttgtggcaccttcattcaattcctgctttttgtaacatatcccatgatcacaatcatatgatgactttgtatcctgtgtctttattttattggaatcaatgcctgattcatacagaatattgccaagaagttttacagatataatcagataagagaggagagatcaagatcatgttctttaactctgtttaaagtattgatgtcaggatgatacttcaagtttgaggtgaagtttttgtgccaaagcctggctcatggctgtgagggcacctaggactcactaaaagatgcgtgttcttcagtgtgcacattacctgccttcatgtggtaagtggtggagagttaaagccattacatggatcactcaggacaaaaacaaattttactgtaaaatttctggtgatttgggagcaaaactaggataactcttttgcacttgcagtatgccataagtgccgcagtttttgactttttctactttgcccaataaaaatgttgctctacaacccttaatttttataactgttctggcctcagttttccacagtgaatgttcctagtttgtgtaatgttctttaggttgctaatttctgcctccagagccaggagatctgtcttcttttgattattcccaaaggtaaattttgggaaaactagaatcaggctatttccctatttttcatttggaaatttctgcattcataaacagttgcttgtaaccttttaatgaatatgcattaggagttgttttgaaaatttattatttagggattatttattagcctggttacttgccagggtggtacattaaaaaaaagtttgtccacccatctgcttcatcccgtaatccccccaaacagtcatcaactaggagaatcgtaatatgcaaataagccatctgcagtgtctaaatgggaggatagcttccaatttttagtcagaaacctgccaggggcaggggaataatttcagtagcattcttccaagggggaggatctcttaagaggcagcatgattaaaaatgcttccatagtaaataaggacactagaattgggtgtccaggccacttgtgagcaaagaacctcctatttccagattcggcgccacctgtgggatactcatgtttcatcataggtgtccacaactttattcttttaatacctctacaaagaccaaaaaaaaagtgataccaattaaaaaatgtggaagaatattaattgggattgaacagtacctgtggttttctcatgtgaccctgggtttgtcttattctctgagaaagtgggctggtaggtaggtgctcttgatgtccttaatttcaaaatgaggaagtcagagcaggcacggtaagtaaagaataatggatcctgagcctcaccttttggtcactccgttggcagggtatgtgcttggggcatgaaaaccaagactcaaagactgccaatcctctgccgcagtttttgagagtaagaactatgcttgctgtaatatggcagaatgaaattatacctgctccttccttgcttcttccttcccttcctccctcccttttcctttcgtttcctttcgtttcctttcctttcctttcctttcctttcctttcctttcctttcctttcctttccttccccttccccttccccttccccttccccttccccttccccttcccctttcctatctttgcattcgttctgctttagttcactgtttggaagggtgaaataaagccctggttctgttctttccccttgtccttccatcggagtgggccctttagtggttaagggtgagggatgagaagttagtctctggtgtctaaggtccctacgatacgtctgaatgttgccaggtgtagaagatgtgtcctgtccataggaggagcttgtgggaagctagctggcgaggttcagaaagtagagttgtgggatatgtggccttaggtgttgtatacgtatgtagttcaaatggaattagattctatatagggtagtgtgtagactgagaacaaaatgacctatcaatcttagggaatgaattaagaagaaggttgcctgtgaaggacaagtcagagagaaatccagaagagattgatgttctgaaagttaagactggacaatgtttcatgaaaaatgtaatcggagaatgaaggttcaatatgttttttgtttgcattttctttttgcttggaaatcatttcaaatttacagaaaaaaattacaaagaatacctgtccatttatttatctaattcaccttttcttatatttaaccctatttataatttcctacacacacacacacacacacacacacacacaccacccaccatatatttttctgaaccattttgaggatatgttactatatcatggtcctttacttctaattacctaagtatttatttcctaagaattgggatattctcttatactataaccgcagcactattatcaacttgagtaaatttaacattgatacaatttaaaaaatcagatctaatatttatattccaattaacaagttaacccaattacattttgaataatatttttctgtctcatacaggttctagtctggggtcaaatacttcattttatttcattcgttcgtttcttttaatctgaaacatttgcacagccttggtttatctcgtttttaagactgcatcctgcccgttaaaaatgcagtggctgtcagtttgaggttgttgctgcctcatgattagattcagggtgatgcaatctcagttggaatattgcatagtgatgtgtccttgccaggatgtccaacctgcaggcaccttatgcccatcggtggcgatgatttttaacatcctttcacagtgttgtctagtttcctgattatataattattgttttctctttcttcccttgcaataagtggtctgtggggagctactgtaaggtcatatagatatcctccttctcctcaaagtcagtgcaagatttagcatccattgatgattattactgggtccagtcttcacagtgataggtgcgcaaacatgattttccatctccatgctctttccatgtttaccatttagcctttgacattctgctctaagcaagagtctcatataattttatttatttattttttgtgtgcactcaagagttcccattttccgttggttcataatttaccactgtactcaatttgagccctcaatcaaatttgagttggctagtgggggccccttcaagatggctcctgtgtccatgtggcatgttcccatcacttacttttgacaaatttttcactttctggcataacaatgtgatcaggctcatcttgtatatactctagccctggagccatctgttcctttgaggatcccagattccttttagtggagaaagggtataggcagtatggtctgtgttttccatttgcttctgtgctgtgtgaagtgttaggcccaggctttgggaactatccatttcttggtagatgttgggtcaagtggaaatgttggggtactgaggaagaacaattttgatttgcaattggtaaatgaggaatatctgttcagagtgtgagtgagatgaaaattgttcttctatttaatttgtttgtaaaccttggctagagttggcctgacagattgtgtccctttccctctggccatactttttttgggagggggctggcctgcattttaatgaacatgcacattttggcactctctcatgcttgcatttttagttgtgttctcgtctcaccatgctctgtaggtgcccctttaacattggttcatcctgtgtgaatgggcagggggaggtggtgagtggatggtattctggttcccttggtgggagcagcctgcagaggccagatagtccacatctgttgttgattgaatcctggtccagaagccccactttatattgctgtgtggaatgagcagaattactactgtggcaacacacagttcgttttttacagtccacctcctttcattgcctcctaacttgcaagtcacctgataatttctgacactttcttaccagtatggagctatttaaaacgcattcctacttttctcatctcatgggatcctctggacaataccttgtgtgataatcaggcagagatcaattctattttacagacagggaaacaaggcaaagagagtacatttccaatggggaaagttagtctcttttccttagtagcaaagagctagtaagtggcagaaccagaacttcaacttggcacttctgcctctttgtgctttcttcttgtcttagttaaaaactgaagaagaaaagtaagccctgtggaagcagcttaggtacaggaattggcagggtaggaggtggggtagatttcttccttcttaatcagtttcctgtctgaagcttcacatactgggggtatcgtttttcagtgtgaaagggaggctgaggtcactttgtgtcttcatgggaaacctgtcccaggaggtatgtcttaaaccccatgcttacctcaaggcaattagagaaaaccatgtgacagcatcggtctcactgactgtggttgatgaagcagagcagaaaagctgttttcttctccttgtcctttacttcagtcttccccatctcatcttccctacctgagctgatggactgtcttgtgaggctggggaggtgtccacttggctctttggttttggttcccagagggaggctctggccgcaggacacagcagatggagcctgtgggagcccatgtttgtgcctcggcaggtgtgggtctgggacgggtctgacctccacctggcacctgcttcttttattgcctccatatgtcaaggggatatgagcccatgtgagtgctttcagattgctctggcctgaggccatggttgggaatggcaggagcatgttgcgggggacagggacctttgtgagggacagttgagccactctgaggttagaggaccacacagctgccccttctagaagcctcgctgggccagaggtgtggcttcattaaggtcctagttggactgtgtcctcatctctctcttatttcctgctctgtttttgattttattttcttaaaatcttcatgctcatggatttttaaaatggcagtaatgatttttatttttttaaagagtaaaacaatggcagtctagtgcagttactttaagacatatcaggtaacctttaccagtaaatcgaaggccattgaataaggaatgtgtaaggatctgtggactccctgaaattagatgcaaaatgttatatgtttgtatgaatgcattttttggaggaatggctcccatagctttctgcagattcttgtggacatttgacagtccctctccaaagtatggcctccaatatgtcttcttcacattcctttggagaactgcctttacctcccgtgtctctcatagatatctgagcactttaatttgtggaagagtcgaggaagaggaggccttgaaaatagtctcctttctaactaccaaatttgggggctggctcagcttcccctcccccattactggttccctgagcaggtctgagccaggataatcttctttaacctccactttctgtcaggccctggtcgtgtgctggatgtacctctcctcatgtaattgtcacaactaccctgtattggaggtgccaaagactgaataacatgtttaacttactaaatagaagaattgggactgccggtaaaaactgccagattccaaagccagagttttttcaatacactcaaggaataaaacgtcagctgctgtttttattagcactcaccaatgagacaccatcctgtcctgttccctgttttcatcctgcagcgccatatattgctccaaagcttagatagtgcccagagcccacctacagctcatcttcctatgaggcagagagctagcttgatcgttggggaataatggcagagctctcagaaggtgctggatccctaaccgctttgctgggttcttcattcctggcccacccgagagctcttctggaagtaaaggcctgaaactgtgaccttcttggctatggtgaaaagtaacagacgtcaagtgttagcaagcagaccctatctgttatttgacttttaaaatcacaaacaataaagtaatcattattacaaggtatttttaatgtcacattggcatgaaaaattttaattctgagagtataatttctatgaattgctatgaatatagtaaattaaaaaataaattgctgtggcggtgctctgatggcatttcaaaaaggtgtttgtcatcctaccctgccccttcatccctctgtgataactgtgtagacaaaggataaaacccaggtgaacctcctgagatagaggttccagatggcactagctgaaaagacagctggcatccagagaggccgtgtggctctttgtacacaaaccatggggattgtttatttttactgctctagtgactcaatataacagtggtctgggaagacttggctttagcctcctctctgttgtgttttaacctcttcatgtctcgggcttcttacttttctcctggtgttgttgagtgtagagtggttgtaatgatgagttcacagagatttaagagctctaagttcttttgggtcagaggagtgatttctcttttttgcagtgtaaggtacaaaatattaaatatctgagacgtgactgtgagaccctggtgaagctacccggagtctcagtttcttctttaaaacacgattatatcattcaaaataatagactgtatcttaaatgagccagaatggatcagacgtttagcattgttactggcacgtgggcattcatgaagtatctaactcttctctgtaccccctcacttctgtatacatgccttctatctaaatacaatcttttgattggctggaagtagagtaggaacattaatctatttctcaaatgcagtgccaagcttaaaaatgcatctctagttctggggatgcccagataactatatcttgggtgtgtgtgtgtgtgtgtgtgtgtgtgtgtgtgtgtgtgtgtatgtgcatgcacatttatctatttgtgtaagtatgcataactgggtctaccagatgaaatgtggcttgccttgctgacttcagacattttgatttaaagatcttaaggtaagagaagtagagttaacagcatacatttagagctagatgccttagcagctggcttggaggcttttttttcttctttttaatgggtagctttttatttattcattttttttaaatgggtagctttaatttcaaccaaaaagttctgggtagatttttttctagctcaagggagaattgtatattgggcactaagtattaacgggtaaaatcctgccaactgcccttttatagatcttcagtgtgaagcaagactttgcataggttgccagccaaaaattgatattggatccaattccatcagagaagctttagtatttttagaagtaacactcactctagcacagcatgcggtgatacataataccaactgtttataaagatccatgttttagttaatttctagaaaattaaattacctttttttttttttgctgatgccttctgtctgtcaaacagaaggaaattgcattagagttcaagatgtggcctttgaagaggacttagatgaattgggatgttgacctttatagtaggaggattgcgtggagtttggttggctgggaggcaggagacctgggttctagccccagttctgccttccatgaagtgtgtgatctggattagtcacaaggcctttgtggccctcatattgtgtagtcattaaacaaaggggttgtatgaaattcccattgtgttttaattttgataagttattataatttcatgatagaaatgaaatatagtgtgcaagtatttttcctaaaattgtgagatcacgtctgtgagatccatgcagcttgggtggatccaccagtcttttttataatgaagtctctgaaatacttattgaatgaatgaatggtgctattaaggtgatggaaataattttccattcacaaattgctaacatactgcctttcatttcataacattcttccaaaaaacaatattcttgtgactattattgagtataaactggatacttctggatacagctctggttgtacataagtgttttcctaactaaaggattgtttggggaaaatgagatttaaagaaccaagatactgatttttggttatttagcactatatccttgccatttttcatggattcccttgtcttatattcagagaacattttcagattgccttaagcctgtttgtttcctgtttatccaggtttcacttttcattgatgggctactacaaggcctaacttttgcatatacctgtgtccaggtgtctcagtccaggaagttctgtagtcctgtttatgccatgtatttggactttcatatattcagcaactatttttttctgtatatattttggggtctcttacaccactgtttaaaatgtggttcccaggccacctgtaatggaatcacatggagatgcttgaaaaagtggcacgtttctggttaatgtgccgttcttactggagcagaatatcttggggacagacataaaaagcctcatgttttgcaagtgactctcaaatttaagctggcctcagaatcactgcttttggaaatcagggttatagctttgttcatgttcttagaatctaacatataattagaattcaatgaatatttttgagcaataagtgagcacatgagttgctgggtttgtggtagttagaaagctatacaatacctttaccagtctttttgtaatgaaagctctgaaatatttattgaatgaatgaatggtgctaataataaggtgatgaaaataatttttcattcacaaattgctaacatactgcctttcgtttcataacagtcttccaaaaaacagtattcttgtgactgttactgagtataaactggatacttctggatacggctctggttgtacataagtgtttttcaccttgtgttacacacaaacacacaccctactccgtttgttggaagcctgcaagtgatcacgcgtatcaatgctaggagtgacgtcaagtagactggctgggaagggcagaatgtggtaggcggttaaaaagcaaaaggcacatgctatatgactttttgccttttcttgttgtctttaagacttttgtgatggttacataacaccagtgggaccagagactagggcaggccaaagatgcactgattaaggaaattactgctacctaacagttattctggagctcaaatatttcctgttcattatgcaataatgtagcctttcgagtctccaaatgccatttggaagaagagggtgggggagttggaggtagtaggttggatctgaggcttagtctcttgcctgctgttttatgggcaaggtggggcaggacctataaaaattccttcacccatggcccttttctcctacaatgactgtagaaaattagaaccctttaactgtttaggaatgtgagtgttcagcataaggatccaattaggatgatggggaggagagataagtagcaatagatttaatatgtgatgtttgatagcattaaaaatgtcccaagcctatgcatgcagtgattgcttgatactgtagttttaatttgagttatagcatagagatggtgatgctatagaggaaaaaacccgcaattatttttgcaccaacctaatattaagttttatatttcacatttgtaggcttgtttcatcaacggagcagtttccaaggcttcaaggaaacattgttctatgttttctctcatccatccccctgtggagggatgttgagaggagagtcggttttgaaggtgcagttcttgctttcatagcatgtagttaaaataaaaaccacagtgtagtgttctgacatcccctcttgctcaggcatagggcatatttggtgaaccttggccattctgacaactgttctggcagctgtttcttgtgtcattcttttctgggctttattgtaatgtaaacccaccaaacaagatttctggcagttctgtacatggaaaatataaggactcaatttgtaggtaagtggtttctatcctggagaaaacaaagcccatcatactggatgttcacatcagctgggctgtatgacaatgttggtgagtcagtgctttgaaggccctaaggttaaatgttttgaataccacccccatgcatagtattttgggttcagtggggctttaaaacatcctttattctccccacatcccatcatcttctgcaaacttaacaatttactatactttttctgaaaatgagccttttaatctcccaatccatagttggacgaggctcactttgaaaagtaaagaggttggcttattgataacttcaggcctgctccttgcttacatgctgatgtttactttttgaaatcgacctaaaaaatgtcaatactttgttatggttttgaaatgtatctgataattcctttctgggcatgttaaaagtcttaattttcttggcaacagaatattccttttagggttcagtatctgcttttcagggttatttctggaaagattttaagatagcttaagggctttcttaaccacataaaacataatttcctcaatacattttgggggaaaaatcaataattagtgttagtgtaacactaattagtgaatgccatttgctttaatgctgggttaaaattgtccttgaatttaaaaattagttaaatcttagtaccaaaaaaataaagtgaaatactacaaagaagttggtcttttgtcatacaacaacctatccatggcagtagagaaaaataattaaaaaatgcacaatctctaacacaactatttttagttttgcattttctttccatcttggccgacatagctacaaagcacaattattggaactacagtaattattttgatttttgatttttattatgtatctaatcactgttttcattttcccatatactatacaaatgtcactgtcaaagctacatattgggctgtccgggtgatttactgtgagcatgcccatattcttagaatttagattccatccagttatttgaaattgtagatgatgttatagggaacatatttttgcctatgtttttcttttaatgattacatcctttaattaaatttggactttaaatttggaatttctgggtcacagttgtttttatggccctgaaataacattctgttttatacttgtagaaatagtttttgttcttgtaaccaaccagagcacaagtgacaggcaagcttttagctttagggatgttcttaacacatcccgaagattttgtgctctcaatgtgtccctgctatttggggcttccctgaaaaagattctgtcaggagcttctgctaattaaattgaattggtccagctttgttgtaaacaggtaacggattgtggtgttttattacttgatacttattgctgaaacaagttttatgaaaaaaggagagtattagcctgaggacaaaagtagtttggagttctgtagaggagctgccagtattaatgaactatcacttggagcctgcaacctgtcagccttgacttttcctctcctgggtcagccatcattggtcctccacattgcttttcactttgccagctaaggcttttcagtggcttctgatataggtcttgtttctcaagtgagtgtgccctcaggaggggaactgggcaatctgggaagggagctttgatttcacaaccatgtgggaatgccagtagaatgagacgccatgatgagtgtgggtacctgcccttcttggcaggagtggactagaaatcagttggtgttactgcaagcccagtccattgatgtgcacatccattgtgggaggatactactctcaatggctgcactgctgccagtgacgttaaaaagtcatccatgtaaaagcatgggtaactgcttaacatgtattaaatgaaaaagcaaaatacgaaatgatctaggtactgcacaagtgtcctaaatgttttgcatatcgtcaaaataatattaatataagaaagtgtaaatagctgtaataagttatggtgagattaaaagccatttctttttcttttttgcaccaacgtgttctttagtgttttggcacatttgtagtagagttttgaagttatttttataaatcagatatgtaggattctaggtctgtgaaatgaaattgaatgaagaggatttgacagtcttcttaaacttctgggaaataaaggctgaaaacagcaggctttcatctgtgtatcttctgaagctgaaatgaacactatgcccattttgctgtatgtccatttgagtattttctaatacctttttggggagtaggtgtatgttcagctgaaagaatatttctaagtatccaagtccttaaggaagctaaaagttttgagttatgcaagtgtgccttcagtgtcctttggcaacccctttctgcactttctccactgctgtggtatgtttcttgaatgaccatgtccctcttcctgctcatgaaagccttgagcttagttgtgtataccttgcataaagcaatagagtgcagaagtaaagaatgctggttctggactcagactcttgatgtggagtcctggctggttttggaactttgggctcttgaagggagtatcctcatctgtacggtggagaccactggtaccctcaggtggctgtggaggttgcatcggttaacactagtgaagttctgagtgcaatgcttggtccatactaacccagaactgcagtggtgatgatacatatgatacatcttcttgggtagttacatattttcttcttgttaccagggtattccttttaactatgagaaatcagaaaaatacagaaaatcacaaagaagagactagaaataacccaaactccacaacaggttttgctttttgtcttctctgatgatgaagtaaaatatgttggccatttggagaagtaaagatgtttgtaagtggggtgtttccagaccctctgaaatatatgcctcttttcttgctatgcctagtataatacctcactcattgtcaaccactagagacttagcttcttgttcttggttctactactaaattttttgacttgggcaaatcatttaaatatttctaggtgttctttaaggcttaaaaaccaaggttagtttagctttgtcattctttcttctcttaacctgtgacttggtttatttatggtttgttcatttcctttatatgtcttcagtgaaagcagcacagaaaatgactttggccatgtcagtcagccaacagcttttgagcagacactcttctggccctgggaattacagaaccacacaatacacacatgatctgtggcttttggagcctgtggcagggccctggatggggaagggtaagcattctgatgctatagtgtgatggaaacttctgtggggaagcataggattcagtgccagtacttgtgatgcaagtagttatttgagcattccttttgtttgtttttaattttaaagttcaaggatacgtgggcaagatgtgcaggtttgttatgtaggtaaatgtgtgtcatgggagtttgttgtacagatgatttcatcacccaggtattaagcctagtacccattagttatttttcctggatcttctccctgcccacacctaccaccctcctataggccccagtgcatgtcattccctctgtgtgtccatgtgttttcatcatttagcacccacttacaagtaagaacatatagtatatggttttctgttcctgcattagtttgctaaggataatggtctctagcttcatccatgtccctgcaaaggacatggtctcattttttatggctgcatagtattccatgttgtatatgtaccacattttctttatccagtctatcattgatgggcatttagattgattccatgcaagttcttagagaccttcaaagaatatttgagcatttctaactggaaggaagtgaaaaagaaaggtgtggtgagttgagcacgtggctgactcattgaggagtcctgggtttgaactgctttatctgtaagagctcaatttaattcagagttaagtgcctaaaaggtatccagcacatgcctcctggggttcgggatgcactgttcttgacctcacagagcatttatttaagctgaaagtcatgtgcctgctgtgagattgggtgctctgagtgtacacaacagaggaaatctggctggtctatgttatttccttggaatgtctcttggagtcagctgtgatgcccccaggggttcaggcacaagggagaaaaatgagtggacatcctaaggctctctgaggatttcctggttgcttccaactcaagttgagtattacaggaaggtttggaaggataaaagccacaaaaatggcagtttctattttctctcacctccatttatcagcctggtcacagcagcaagtaaccaagaggtcctaaatgcagtgtccaaactgtatgtgggcccaagacctgccaaggtattcaagtacagccacactgaagctttgctttctaggcacaaagtttgattatcttatatctgcttgccatgctttttaatataactggagttagatgttggggtttctcagtctgtggacaaatatgcaggtgcttatgtatggaatattaatgatggagtttaaaaagagttacttaagaagaagtatctagcatgggataaccgtggattgaaaagcaccaagtgcatcttatgaatgcatttctaggccctagcacagaacttgccactgtgggcagcatgggaatgttaggtaaaggtaatggatgaatggtctgtgttctaataacctgcctgacctgtctggaatttccaacatttatcccacacccaaaactcccatctttccaaacaatattatattgcccttcctgctaaactgtttgtgtacggaaaccttatgatatataacagcatggcataacctgatccatctttgcattctccacgttgatcatagctttacaaaatgacctttttcactactggagtcatgtcacagtacaacttccagcagtgttgctgttttgataatgataagggaaattaggtatcattttcttttgactcaggaagattattttcccattgtgcaagtttactagccatagagttaataaccctcatcacccttatatcaactggaatttttatattattcttggaaatgattttaagtggatatttaattcaaatcttgttactcttgtgtccactgtacgtactacttacctagtccttggtttagtctttaatgcccaaaccaaaattaaggccagttctctacttattgttataacaattgcctgccctgtgtttcctgggtggttttctttattgtttaaaattcattacagtgatcctagtgtgttggatactagcataaaaagaagtcccttcatgtgtgatgtgttgttattgctaaattttcttacaatttgcttgtagtaggttacttgctctaacctgccagttgcctggaagggaaaggaatatcaaaggtgaacctagtgcatgaagtatttatgactcagatggtctcttctggtctgagaagaactgaagttgttgagtggagtttgcagtaaatggtggtatcttggtttgatagctttgggacaggagcacaaacatttaatggtgaattcacggtatgatgtatttcagcccaaagttaagaccaaagcacaactttagccatatatatcttattaatgaagcttattaagtgagtaaaggaatgaaaatggaaatggttggaatatgaccatcagattcaggcccaacgagagtattcttaaattcccagtcttacataagaggctgttttagaactctggggacattgaattcccataaacgtctggttatagctcccttgtagcacttgtgctgtttattattgcttttatgtctgtgttctttacttagtcgggaactcctatagctaggaactgtgtcataacatctttgaatgaataaattcatataaaagacagaattccaccctggccttcctcaggacaaggaaatagtggcaacaacattatctttggacacacaagtgtggtttgaatcctgtttcttttgtttactagccatgtgcctttaggcaaatgtcttgtcctttctgagccttagcctcctcaccagtaagagtgggataataacctcagaagttattaacatattcagaacaacctaagtgggtgctttatggagtcacagcacgtaatgaagtgcctagcataatgtcatgattactgataaactcagtcagacacttaatatctattcctccatccagcttaccttttgatcttaaaacactgatttcagccgggcgcggtggctcaagcctgtaatcccagcactttgggaggccgaggcgggcggatcacgaggtcaggagatcgagaccatcctggctaacacagtgaaaccccgtctctactaaaaatacagaaaaattagccgggcatggtggcaggcgcctgtagtcccagctattcgggaggctgaggcaggagaatggcatgaacccgggaggcggagcttgcagtgagccgagatcgcgccactgcactccagcctgggcgacagagcgagactccctctcaaaaaaaaaacaaaaaaacaaaaaaaccactgatttcatagcactgatgttttgcaagatatcctagaggggcccttaaaaatttatcatttctcattttcaagtcagtatcaaaaaagtcctatttcgttagacattcatttatgtatctattatccagatatttattgggttcctgctgtattccaggccctctgctgagtgctagaggtatataaaccagcaaaacaggtaacgttttgggttgatctacctgtatcttacttacagtagagagagacaaaaaagtcaacaagtaaatgaaaacattgttgtgaaagtatcatgaggaaaaccaaatgatgaggtgaagactggttgggagtgatagaaaattattttggatagagtggtgagagaattcccctttgagaaatgatgtataagctgaggcttaaagaatgagacactgccaccagtactctcctctttgtgggcttgggggatgtgcagaacaaggacttcttgccttgtgggctaaggccataccaccagcctctactgtggttaccctgcccttggagctaatatcaacaggtaggtgggcctcccctcagctaagctgccaacctctcctcaacagagggtccttaccacccacccctccttgatgtcttataagctgatcccttcagactgggggagggggtggtggtgtgtgacttctctccatttccctggttctggaacttttaatggacatccgaattacaggggttttgtgagaattacattgttggatcccatatgtaaaaatggaggctaatctatcaattattaaccctggttgtactttaaaattctgattaagaaacgatttttggcaggagaggctattagccaagtgtaatgtatgtaacacttactttataaaggtatgttgaatgaatgtatgaattctaaattgtaagatttgaaatgaaaccattgccattttctctcatgacattagattatggaaagatttattttaaaagacatggaaggcatgaactgcaaaagaaaaaagtggtaaattttaatcaaaatttaaaacttttgttctttggaagatagatctgggggaacaaggcaagtcataaactgggagaaaatattgtaaagcaaaaatctaatgaaatgtgtgtgcttagaatatgtgaagaactcttacaccatacaaaacagacaacccaataaaaatatagacaaatggtttgtatagacctgtcttaaaagaagatgcataaatgatcaaaagtatgtgaaatttcaaggaaatgcatattaaagccacaatgcgatacaactgtatacccactggaatggccaaagttaaaaagagaataccaaatgctggtgacgatgtggagcaaccggcacctttatacatttttgttgggaatgcaagttggaaaacattatggttgtataagataacataaaattgccgtataattcagcagttcaactccttggtgttagtcgaagagaaaggagaacatgttcatacagactttatgtgaatattcatggcagtgctattcataatagtcttaaaaactggacgcaacctaattatggtatgtctgtactattgaatattatgtaacaacaaaaagaataaaatgttaatacatgaaaagacatgttgaatcttaatgaaacttttaaaagttatgctaagtgaaagatgtcaaacccaaaagaataaatactgttcaatttcattatatgaaaattgaaaattggcaaaactagtgatataaagcagattagtgattgcctgggctggtagttgagagatggcatttgactacagaaagtaccaggaaactttttagggtgatagtattattattaatatatcttgaatgtggtgggagttataaggttgtgtgcaattatgaacactcatcaaaatataaaattaaaatgagtgacttttcttacaatttattattttgtcattaatttgtaaaattataacttgtaccccagtaaaaacattttaaaaatatatagtctctgccagtttatcttatttgcttctactaatgaagcattctgcagtgtttcatcattaaatataataataaaggattatttttctaagcattttatattcttattctttcagtagtcattatatgactagagaatttggaaaaagtttccttttttcttttttttaaaccatattaatccaatttgcagaccttttatttatttttccaagggcattatttctactatgaaaagactggacaggtttatgggacacattttttttgttttgaatcaaagagcttgtcataatattaaagaaaaccaacaacgttggtatgattcaaaaggagctctctcaaccggctgtctctggtaagacaggcccagtaatgcccacctgcaaggctgttgtgaagatgaactgagaccacctatgtcagatgtagcagacagcatatgccctcagaaggctggtagctttactgtgtttctccataacacttctcatttctcggagacaaggtcagggaatgttttgaaatgtttatttgaaaagtatttattgtgcatatattatttattcatttacttactatgtccttgaaatggagactgtattatacagatattcaggtcagctttaacatatcctttaggcctaatcacttttttctttcaacatgcctaatgtagcataatagttaatagcatagtagtttgacttttaaaattgatttctagggaagaatgtaaatataggaaagcttcctgatagagattatctaaacttaggcataaataataagtaaaactctgaatttaggtatgtaattgtagaatccctttgattataagcaagttgaaaaaaattgttttttacctagatgagtttattttaaaaagttattaagcatttataaaggagccttttttggggtggctcctaattattaccaagtttccaatattataaactctgtgcttgagttgaatattatagtttaggcttctatctcctagtagtgtttccaagcaaacagtttttccagtctctcagaagttcatttcagttaccatctcctcactattcctggagtgtatgttgcttatggtagcagctcaagggacagatgtatgaatgagagcaatccataaatgtttgaattcaaattatagtttttttaaaataaattctgctataaaaagaaatgaaatatttgtccatgctaaaacatggagaaaccttgaaaactttacttatttatttttattatactttaagttctgggatacatgtggagaatgtgcaggtttgttacattgatatacatgtgccatggtagtttgctgcacccatcaacccgtcatctacattaggtatttcttctaatgctatcccttcccttgccccacattccctgacaggccccagtgtgtgatgttcccctccctgtgtccatgtgttctcattgttcaacacccatttatgagtgagaacatgtggtgtttggttttctgttcctctgtgagtttgctgagaatgatggtttccagcttcatccatgtccctgcaaaggatatgaacttatccttttttgtggctgcatagtattgcatggtttatttatgccacattttctttatccagtctatcactgatgggcatttgggttggttccaagtctttgctattgtgaataatgctgcaataaacatacgtgtgcatgtgtctttagagtagaatgttttataatcctttgggtatatacccactaatgggattgctgggtcaaatggtatttctagttctagatccttgaggaatcaccacactgtcttgcccaatagttgaactaatttacactcccaccaacagtgtaaaagcattcctgtttctccacatcctcgccagcatctgttatttcctgatgatgagcttttttcatatgtttattggctgcataaatggcttctcttgaaaagtgtctgttcatatcctttgcccatgtttctatggggctgtttgtttttttcttgtaaatttgtttaagttccttgttgattatggatattagccctttgtcagatggatagattgcaaaaattttctcccattctgtaggttgcctgttcactctgatgatagtttcttttgctgtgcagaagctctttaattagatcccatttgtcaattttggcttgtgttgccattgcttttggtgttttagtcatgaaggctgcccatgcctatgtcctgaatggtattacctaggttttcttctagggtttttatggttttaggtctgacgtttaaatatttaatccatcttgagttaatttttgtataagttgtaaggaaggggtccagtttcagttttctgcatatggccagccagttttcccaacaccattgattaaatagggaatctttttcccattacttgtttttgtcaggtttgtcaaagatcagattgttgcagatgtgcggtgctatttctgagggctctgttctgttccactggtccatatatctgttttggtatgagtaccatactgttttggttactgtagccttgtatagtttgaagtcaggtagcgtgatacctccagctttgttgtttttgcttaggattgtcttggctatatggacttttttggttccatatgacatttaaagtagttttttctaattctgtgaattttctaattctgtgaagtaggattttctaattttgtgaagaaagtcaatggtagtttgatggaaatagcattgaatctataaattactttgggcagtatggccattttcatgatattgattcttcctgtccacgagcatggaatgtttttccatttgtttgtgtcctctgttatttccttgagcagtggtttgtagttctccttgaagaggtccttcacatcccttgtaagttgggttcctaggtattttattctctttgtagcaattgtgaatgggagtttgctcatgatttggctctgtatttgtctatttttggtgtataggaaagcttgtgatttttgcacattgattttgtaccctgagactttgctgaagttgcttatcagcttaaggagtttttggactgagacgatggggttttctaaatatacaatcatgtcatctgcagacaatagtttgagttcttctcttcctatttgaatacctttatttctttctcttgccttattgccctggccagaacttccaatactatgttgaataggagtggtgagatgttgaataggagttttcaaagggaatgcttccagcttttgcccattcagtatgatattggctgtgggtttgtcataaaaagttcttattattttgagatatgttccatcaataccgaccttatggagtgttttagtcattggttctgtttatgtgttttttgtcattggttctgtttatgtgatggattacgcttattgatttgtatatgttgaagcagccttgcatcccacgggtgaagccgacttgatcgtggtggataagctttttgatgtgctgctggattcggtttgtcagtattttattgagcattttcacattggtgttcatcagggatgttggcctgaaattctcttttttgttgtgtttctgccaggttttggtatcaggatgatgctggcctcataaaatgagtaagagaggagtccctctttttctgttgtttggaatagtttcagaaggaatggcaccagctcctctttgtacctctggtagaattcagctgtgaattcgtctggtcctgggcttttctttggttggtaggctattaattactgcctcaatttcagaacttgttattggtctgttcagggatttgacttcttcctggtttagtcttgggagggtgtatgtgtccaggaatttatccatttcttctggattttctagtttatttgcatagagatgtttatagtattctctgatggtagtttatatttctgtggggtcagtggtggtatcccctttatatcattttttattgtgcctatttgattcttctctcttttcttctttattagtctggctagccatctatctagtttgtcaactctttcagaaaaacagctcctagattcattgatttttcgaagggttttttatcttcttcagttctgctctgatcttagttatttcttgttttctgctagcttttgaatttgtttgctcttgcttctgtagttcttctaattgtgatgttagggtgttgattttagatctttccctctttctcccgtgggcatttagtgctataaatttacctgtaaacacgctttggctgtgtcccagagattctggtacactgtgtgttcttattggtttcaaataacttatttgtttctgccttaattttgatatttaccttgtagtcattcaggagcaggttgttcagttttcatgtagtcgtgcggttttgagtgagtttcttcatcctgagttctaatttgattacactgtggcttgagaaactgtttgttatgatttccatttttttgcatttgctgaggagtgctttacttccaattatgtggtcagttttagaataagtgcgatgtggtgctgagaagaatgtatcttctgtttgtttggggtggagagttctgtagatgtctattaggtctgcttggtccagagctgagttcaagtcgtgaatatccttgttaattttctgtctcgttgatctgtctaatattgacagtggggtgttaaagtctcccactgttattgtgtgggagcctaagtttctttgtaggtctctaagaagttgctttattaatctgggtgctcctgtattgggtgcatctatatttaggatagttagctcttctcattgcattgattcctttaccattatgtaatgtccttctttgtcttttttgatctttgttggtttaaagtctgttttatcagagactaggattgcaaacgctgctttttttttttttttttttttttttttttttgctttccattgcttggtaaatcttcctccatccctttattttgagcctgtgtgtgcttttgcacatgagatgggtctcctgaatacaacacactgatgggtctcctgaatacaacacaccgatgggtcttgaatctttatgcaatttgcaagtctgtgccttttaattggggcatttatcccatttacatttaaggttaatattcttatgtgtgaatttgatcctttcattatgatgctagctggttattttgcccattagtggatgaagtttgttcataatgttgacgttctttacaattttgtttgtttttgcagtggctggtactggtttttccttaccatatttagtgcttccttcaggagttcttgtaaggcaggcctgatggtgacataacctctcagcatttgcttgtctgtaaagggttttatttctccttcatttatgaagtttagtttggctggatatgaaattctgggttgaaaattcttgtctttaagaatgttgaatattggcccccactgtcttctggctcctagggtttctgctgagagatccgctgttagtctgatgggcttccctttgtgggtaacctgacctttctcactgcttgcacttaacattttttccttcatttcaaccttggtgaatctgacgattatgtgtcttggggttgctcttcttgaggagtatctttgtggtgttctctgtatttcctgaatttgaatgttggcctgtcttgctaggttggggaagttctcctgggtaatatcctgaaatatgtcttccaacttggttccgttttccccatcactttcagatacaccactcaaccataggtttggtcttttcacatagtcccatatttcttggaggcttcattcattccttttccttcttttttctctattcttgtcttcatgctttattttattaagctgatcttccatctctgatatcctttcttctgcttgatcgatttggctattgatgcttgtgtatgcttcaccaagttctcgtgctatgtttttccgctccatcaggtcatttatgttcttctctaaactgattattctagttagcaattcctctaaccttttatcaaagttcttagcttccttgcattgggttaggacatgcttctttagctcagaggagtttgttataacccaccttctgaagcctacttctgtcaatttgtgaaactccttctctgtccagttttgctcctttgctggcaaggagttgtgatcctttggaggagaagaggcgttctggtttttggacttttcagccttgttgcgctggttttccctcatctttgtggatttatctacctttggtctttggtgtcagtgacctttggatggaatttttgcgtggtcatgctttttgttgatgttgatactattgctttctgtttgtcagttttccttctaacagacctgtcttctgcaggcctgatggagtttgctggggggccactccaggccctgtttgcctcggtatcaccagcggagtctgcagaacagcaaagattgatgcctgctcctacctgtggaagcttcatcccacaggggcaactgccagatgccagccagagctctcctttatgagatgtctgtcgacccctgctgggagatgtctccccatcaggaggcacaggggtcagggaccccacttgaggaggcagtctgtccgttatcagaggtcgagcactgtgctgggtgatccactgctctcttcagagccggcaggcagagacgtttaaaactgctgaagctgtgcccacagccaccccttcccccagttgttctgtcccagggagatgggagttttatctataagcccctgaccggggctgttgcctttcctcagagatgccctgcccagagaggaggaatccagagaggcagtatggctacagtggctttgtggcgctcaaaattcttgtgttctaatgatctgaagttaacaggatgcagatcacatatctaaattgacttgtaaacatttattttaggaaatgatagtatattctctcatcactaatatatttctgttgcttcaatgtgcaaaacactgtgctagatattgtggggaagactaaaatgaataatagctaacactaggcaaggtcacattgtttgtcagatgctatgctaaatgctagatgtgggtgatttcatttagtgctgaaacagccctgtgacagagctcttgttagtttctctctctctctctctgtctctctctctaccgtttgaggaaactgatgctttaggaagacataaagatacaaatggtggaactgggattcaaattgagaccacaaagctgttgttcttaagtctgtaacatacaaagcctcacctttctcatctgaaagtgaggataacaagctagcttgttgcaaaggttaaataaagtaatactgtaaaacacttggtaccacagaatactactattacttcttaatggtagtaattattatggccaccgtagaggagggattataaagattaaaataaatgatacacataaaggatttagcatggagcatggcatgtaagcactcaccaactcaaagaggcatcctttaaattggactgtgaaagttgacagcatttttacagttgaactttgaacaacacacgtttgaactgtgtgggtccacttatatgcagattttcttccacctctgccacccttgagacagtgaggccagtccccccaccttcctcttccacctcagcctactcaacatgaagatgaagatgaagacctttgtgatgatgcacttctatttaatggacagtaaatatatattctcttccttgtgatttattaatattttctttctgtagcttactttattgtaaaaatacagtatataatacatataacatacaaaatgtgttcataactgtttgtgttattggcaagtcttccagttaacagtaggctattagtagttaagctttggagaggtcaaaagttatgtgtggattttcaactacacaaggggattgatgtccctaatctccatgttgttcaaggattccacttgtatatagagagatctgtgcttgagggaaaagaacatgatcaagattaggggaatgcatgtacaaaggtgctgtacaaagatgagattaacgctgttaggtagccagtttatatctacacaaaggtacataggaagagtaaaatgttgggttggaaaggaatttggggccaaatcttacagatcttcaaggcctggcaaagaagtttggctttgtctatcttttggaaagccattgttctgagttaactcactcaaaaacatccagggtttatttcttagcattggtaaatgaattctttagacactgaaaaaggagggttgcctttgaatattttcttgttgtcattattattataataaatttattttctaaaatgtactgaggtagtgacttgacagaatcaaagcatctcagaaaatgagtcattggcttctttctaatagctgcttaggattctaaatgtttgtgttggcagatctcacataattttcttaagtctgtgtgaaatgttcaaaagagtttcctatgataatgtttggttcattcaggttgaaaatgatgaaaacaacttctagaaagagatgacagtgtaagttacatctggcaacctagaaacaaagttctgtagactactcatcatatcaatcattttttcccaaattattatggtgaaacctagatacaaagagcactgttccatcagggatcttatctatctctgaatagaactgtgtttcctgtatgatgttgtgtgtgagtgcatgtgtataaaaataagtctgtcaatgtgggctttttttcctttttctcttaactcaaggattaatcgtaaggttctctagtgtacatttttcattattgttttgagaaagagtcttaccctgtcacccacagtggacagtgacatgatctcagctcactgcaacctgcgcctcctgagtagctggaattacaggcatgtgccacaacacccagctaattttttgtatttttagtagaggcagggttttgccgtgttggctaggctggtctcgaacttgtgaccttaagcgaaccacctgccttggcctcccaaagtgctgggattacaggcgtgagccaccatacctgccctatcgcgtacatttttaaaggcacaattgaaaccagtgttctgaattaaaccactcacattagcttacaaatactacattctgatttggttggatctctgttttcagtataatttaagtgaaaaaaatcataattgtatgataaagataaatcgatgttaccaaagtatatttaaaagggcattggtaaataccacaaaacgtattttctgttttaaatggaaaaaatagtttactatgtgcctatttaacttacacaagggagtttgctttattagagtaactgcaaatgaggcaacaaaatttttcttttggcaaatacacgtattaggtctcatttcaggtttgaggaaaatagtgaatatttttagttattttgaatacaaatatgtaatattctttttctgagaagcctaagtagtttttcttgctatgcctgaattttggcagataaacgtgtcaaaccaatttgttatacacctgttgtaacagaagtgacaaagaaaaatcacagttcagagatttgacaggtttgtactgaaatggtgtttagtatatctaggtgttctatctagaaaaaaagtatagaatggctcaactttaaattgattaatctaaaaagaaaagccttcataaccaccagcttttatttagtgttccacatatttctaatattccaacaaggatatcttccctggagagagtagagttgagatcataccaactctgattagaattttcacttaagaacagcagttgagatgatgttatctacattcagattctcaacttagttatggaataaaatattgcacatgctgtgtttgataaaaagtaagtgaaatgtgagtattgtcaggattttacttaaactagaaataaatgatatccttgtaacagtttgaagtacacaaaagaacgtgatatatcctctttctcaagccttaataatcatggtatggattggttgaagattatttgaggtgatatccacttgaagtttttttgtttgtttgttttttttaagacggagtctcgctctgtcacccaggctggagtgcagtggcgcaatcttggctcatggagacctctgccttccgggttcaagcgattctcctgcctcagcctcttgagtagctgggattacaggcgtgtgccaccacgcctggctaatttttgtatttttagtagagacagggtttcaccatgttggccactgctgacctcctgatccgcccgcttcagcctcccaaagtgctgggattacaggcgtgagtcaccacgctcggccttgtcttgaggtttttatggctgaagcatatttttgtaaatcatgttattggtgatatgatggctaaagccgacctgaatacattatacagtctttcctattgtgaacatattaattaacttgtgagattgctcatgataattctttttagggcatcttgagactgccttctgctgcattaggagagtttattgttttatgaaatacatgttttctgcccatcactggtcatcttatgtccttaatgctagaacaataggaattttcccagggctgaattctggcaccatttcatactagaccttttctctgtttctccccttttccttgtgtgtgtgtgtttgcacgtgtgcacacatgtatgtgtggtgtgtgtgtgtgagagagacatagaacacctattttgtttcttggctttgctttttattgttttttcattagtttttactgttcttaattcctaagacataatgaattttaatatctggcagggtaaactttcagcttttgctttattttcttgaaaaaaatgtctaagccatttttttctccatgtatatttttagatttactttgttaagcttcctcaaattcctgatgggatgtaataggaaatcctctgagactataaattaattttacagggatttgacatctttaaaatgttgactcatctcatccacgagtatcttctttctgcatttatttagggaattttaaatgtcctttaaagttttgacattttctccttgagaatcttgtgtgatctttgttagattaattccaagatgtattgtttttgttgctcttataattaatgctgtgtttgccttttttctggttattgcagaggaatactcttcactttgtgtatattggttttatatttgacagctttgcagaattgtgtagttagttctccattaccttattagctgtatatctttgttttagcagtttgtgggtgataaattctttctgcttttgtctgtttaaggaagtctttattttgctttttattttgaaagagatttgtgttggctaaagaattctaggatgacatttttttccttttagcactttaaagatgttgttttcatatttccaatatttcctcatctttagtattgatattgcttaacttgttttaaattcttattttgtctgttttctcactcattacttcagtagttatttttcctctatttttattctgtctttaaactgcccagggtttacttttacttatggtgtgagtcggggatctttgccaaatcattgcctcctctctcttgtcagtcctgcctgagactcttccaaattattagccttttcaaaataccacttagtggttcattaatcagtctgagtgatgaattgattgactggattttttttagttcattgatttctgcttacatctttattttctgctttcacatttctggctttattctcttggatttgtcccctttggtggatttagttatcagctaattgtaaatcattattattttctattgaaggcatttaaagctcataatttactgttgttactgttttaggtgcatgccgtaaattttggcatgagttcttcccttctcattatactttaaggattttatagtttccctcatttcttctttaaatcattattattcattattatttttacatatatgtgtttttattttatatttcagatatgtgcagtctcttctagtcatcttttttattgtttctacctttattatattgaggtaagaatataatctggtggagtttttgtaattttttgaggcttcagttttggtctatgaggtgatcaagttctgtgactgctccatgagtgcttcagaagagcagctagtctatgtcacaacactattaattagtgtatttacattttctctgccatttctgagatgggtgtcttaatactatatattatatagagtgagtatccctaatccaaaaatgtaaaatccagaatgctctgaaatctgaacctttttgagcaccaacatgacactcaaaggaaatgctcattggagcattagagttcagattttcagattacagatgctcaacctgtattattaattgatttaaattttctatcagttgctatgggaaacatactgaattatccaatgaaaatagttgaatttgttattctagtagatctgttacttacttccttctatattttgtggtcatattttcaggtacatatacctctgtgattgttgtatttttgttctacagcatttcctgtaggtaaatttcctcttggtcctttataatgtttttggctgcaattctattctgtctgataataaaattgcttcatggggtttcttccattttatccctctgtgacataatactttccatacacttaacattgactggttgaatcatggttttctcaaaaatccaatctgaaaagtctttcttttggtatttagtttcatccatttatattttcatcatgattacttttctatcaggcttattttcactgtcttgttttctgtcttctatttattataactgttttgtgtcttgctcgcattgctgttttcttttctaccttccagtggaaactctttaaatcagatgtcttatttttttccctcagttctgggaaatatttgactgttatttcttcaatactttctcccatctgtttactttcctctattcttttgagattcctaatacttctagcctccagattttttatcttatatctcattctttttacctttaagatgccatctggagagatttttggccaggttttctaagatactgtgtaggttgtttgagctgttgtcttttattgatggtgcttctgctcctcatttgcctcataattttctctggactcatctttaattcctctggagttattacctgcttctgtggttggaatgtgtcccttcccaagtccaagtgctgccaatgtgatagtacaaagaggtagggcctttaaaaggtgattaggccatgagagctcctcgccttgtgaatgagaccattcctttgtgtacttaaatgatttattgctcagaggaacttaacttttacatggaagcctgaagggtgaaagcagttcaatttgagggtggctgaattgggctagtcttatcaaagaagaagacagatactgccttggtgaacattcatggagacattaacaaggggctgatgcagaaggtatgtgatgacctatcttcaaacaggtagaaaacatcacatctgtaacaaaagaaatgactaggcagatcttcttttaaactctgggaagagcagttgtgtgctgtattcacacagcagctatcctgtcattatcccttcagcattttaagctttgactttacccccctctctcattagcagctagcttctagaaggtgtcaagacacggagagagctgcagactgggggagggcaagaaatctggagtcagatgatcatctttcccagttggaagaaaaccagattggaaaaactgatactttggctgctcctgtttctctccactgaccactcctgtgctgccgaagactgaatcatcctttctctgtctatgctcatgtatcattcataatatcgctttactgtggtgattataacatattaccctctggttttctgtgctgcttcccctgaataaatggactcctctagggaagggggattgtcgtattgttttgtgtgttcactgaagatttgttaatgaaataaatgaattagcagtcattgaaaatgtagccatagatatgaatcctgcctgttggctagaccattgagagttttgatttatttataggagaactctgttctgagccaatatgcctgtcagtaagactagtctgtgaaagcgtagattagggcttggaatgaatagaatttaaagatgaaagttaatctttatcatctatctatatcatgtctaggagtcttagaaaatcaatgcttataaaaaattatgaaaataaatttgtagataaaaatgagtttaattatcactgactgtatgaaccagtagctagtgtgaacaagaaatagcatgctggcaggaatgagaacacattatcacgtgacagaagtgtaatacccaactgcaaaggtgctataggatcaaaatgcatagaggaaattaggtaatagtacaaaataaaaataaccaacatctggtaacatgtagacattttccatctaaattgttgcttttaatgacaaagtcatgctcctcctggaggatgtgatgggagctgtgcagtgagattaaataggtactggaagaaaccatagtttggtgttttgcagttgttcatagatcaaatagttctttgctttgtgtgaaaaatccctcagcagcgagagatgaggaggatgaattagatcagcatgaattttccttttcctctagaaatgcttcagacacctaagggccttaagccagggtccataagtggaaagctgtaagggaaaaaagaaacttcacagtccaacaggtgagaagactgtaatttctgatcaaataaatacctaggtgtttcattgtcttgtctttttgaattcatgtagtacttcctttctcaaataaccccagaaggatggcaaggggtgtacgtgctgtgttttgtccctccctcttcctgtgcccaactggtaaggaaattggatgttttactacgatctctggctccccacccctgccccctgctcatatagcttgggaagtgatgatatgcgctgagtccattctaataaaacacacaacatgacttactgcttcatgatatgttttataagatggattgatttatgcacctatataagttgagtctgaatagtcagttttcgaagtgaattaagaataaatttttgttacattgcatcttatcaataagcattttaaaaccccaagcatatttatttaaacatataatttaaaaataaatgttttgaaatggtggttgaagaaccttttctttatttttcacattttctgatgtacttgctgttctcatcttctgatttcatgccctctggccttctagccccgtgcatcgtttttgagcacatttgaacatgtctgatccatgtagtctgaacctgttgctctctgagggttaccctactcatccctgcatgcttgccttcatctggaaccagcctgatgcattccaagaggaggatagaggtgggtccaggtcactttgcacagggatctgcacttcatgatccagaagaaaagtgcttttaaagcccaacttggcacattttaagtcaaaattaggtttgtggcagttggcacatctcttaaattctctatttttttagtcccctgaaatcatatttggagtgaaagaactgaaaaagttaaaactcagtctcttagactggcttagattggctttctataattgatttatcgtctacttaggcaatactccaatttctttattttctatgtaaattgtgttgatggatcagtacacaatattgtatcatttatcatttctattggaatgtttttattttaattactttggtagaccgatttgcattaagaaagttacccatggatagatatattagaggatgttttaatattctttaatatataatattcttcagaagattaaccaactaatgtatcataaaatcggtagagtaactgactagctttatgaaattgtaaatttgttgaaaattgattttttttttactggagacgagagttccataattgaaaaaatatcctatgccagtgctttgtagattgcaagtaacgtagataatcttgcctgtagttccttgatgaaaatgatctgttgcatttacaatatcacaagtaattaattattaaagtatatgcctgtgattggtatgttttatcttaattctacttattctcttagtcatgcaaagaagaaataactgccagtggtagctgttgaaattatattcagatctattgaggagcatgttttgaacatcttttatgcttatttaaaaagaggcggagcttgtagtgagccgagttagtgccactgcactgcaagcctgggcgacagagtgagactacatctcaaaaaaaaaaaaaaaaacaaaaaaggcttttctatgggattctcatttgtttaaattatacatgtgattacttgacacgttaaagtgtacacaatttaggaaaatgggattaaaaatccagaaacacttaagaagttcttatagtgaagattaaaaaagtgatttcatttaatgactttcagaaaaaaaaatcactgggtggaacataaatgtttgaagtattcttgaacaaaagtgctctctgatactatagacataaaaattcttaaattacccgtgaaatatgctgttcctagggaatggttgtgaagtactttttagtcactcacctgatagagaaaagtagtctgaaaagctcatacacactgaattacttcttcagtttaactttttttgtgcctgctagttagttgccaggcactttacattgagtagtgaataacagacacctgcttttcaagggctgcttctgtagtatgagaaagagatacatgaacagacaatttttaatatactgtagtgaatgctgtcatagatgtacatgcacatgacctgttgtaaaatctggagcatgataggagagagagagatttgtgggcaggttgtcttctaggtcacccttccctcaacaccatgtagatgtgacctctctggtcttggcagtagtgtggttgtaccacaaacagaggcaggctgatgaggttgacggattttggtgttattctaattattcctttaagcaagtcatttacgtttctaagtctgtttcctctctgtgaattaaggaaagtagtaaaactaccctgcctcccaaggcagttatgaggactagctggggtaatgtgcctgaatgagctttgtatatagggaaaatgtatacaaattaatcgttagtatttgtggcactcactctgtgatttggcctatttcacctccctatgctctggatttattatctgtaacgggaacaataatggttgttcttacaaatggtagttgtgaggattaaatgagttaaaatatgtgaagcccttaaaacagtttctggcatacagtaaatattagctctcattttgatattcttatagcagaagaagttgaccctacctctctgttaccctggcagaaggttttcaagatactcattttgtggtaccctggacattaagattccatgtaattttgatggcataatgaaaactttctattgttggacagttgttgtagatgagcatccagaactggattaactgatccactgcagataggaacttatgaggtgagcaggtgctcccctttagctcacactatttgctgaatagtttggaaatgcctctttctggcattcaaataatatactcttctttagttgcagaaagtcagtttaatgaacagtgattaagatgctgccttttggacagtcattaataaatgttaattaaaaaccccagtctagagcatctgccgttgtcccctcagatgggtacctactatttcagatctgttttgtttagagaactacagcaagcttagtagccatttctgatacctgttttagtagcaaattatactgcttcctgttcgtttgatttcttccagggacatattttattttcctgcctccttagaatgtctggcaaaaagctttatttcatctgaattctgctgggtcatcacattggacttgtggaagaaaatggatttataatagcaattaataaaaaatagtaacaaataatattgcttaatagtaaatgtgtactgtatgtgccagccacagtgctaagcattttaatacaaaagcataaaataacattgtgagatttcctctagcaattttaaacttaaactagatgtttattcgagggcagctttaagctgcatttgcatagcaggctttttgctgtgtatttattgggaggagagctgttagaaattacagagctgttggaaataaaccctagctaattctcagggtttcttccagtattgaacttgtctgaaaagctgttggaaattagtgtgcactgactcccccaagatgcccctggaaatcaccactgcttgctctaccaaggtaccagaaaatctgccctggaaaatgagtcctttggattaaatctttccatcttcaggacctgcttgaagtgcaggtgtccctggagagggagctaattaaatcatttaacacttaaatagggattcagttatgaaattatcttctgagaaagaaaggagctgaaggctcaagtaacttttaatgggagaagaaaatggtgatggaagatttcttgctagtggtacttcctagggaattaactggagatagaactgggaagccagggagagaatatagagtgcagaaaaagaacgggaaagggcagatgggagtgagttaagcggccactaaggtcccttcctgtatttacactgggatcccatattatagagaaagtccatttggctctcttccccatctcagacaaagctttggttccctttggtctgcagcattgtctgtgttcctgggagaactcttcagttccatttattggctcagaagtagatgctgttgctataggatgatggctggcagagccattcctgagaatggctcattctatgagccagtgtcatagaattgtccttggaatgtcagccattgaagtaagtggtgtgtgtgtgtgtgtgttttctcacgccattgtgtcttgtattcctgggttggagagatattaatgaatttgtggagactaggaaaatagttaaactctagattgtctcatttaggttcagggagagaagtcttcatccttgtaacacagtgttgtacttacacgctctctggaatttgagttagaaactggtggtataacccagaaatgcgtttactctcagagtttactgattatttcatcagatgtggctcagaattagtgttgttccataaaagttgaaattggttcactttagaggcaaaagaatcttgactttcaagctgaacaaaaaataattgggaagttaggaaatatcttctagtttaagactcactgcttgagagcgcttcatcaccattaaaatgggaagacaaaaatatttcaattttcataaaactgggttcttgatatgacttttggctggaatttactaatatctgagattactttccccagtctgtaaacatggataatggtaactgcctgtaagagtagttgtaagtatagtggaagtattaagtaaacaggcttggattatgactctaccacctattgggctatgtggacaactttatttagtgtctttgagttagagttgcctcatccagtaaaaccctggcagggtaagaatttaataagatgtatgctaaatgcctggcatgcattaagttggtttgccattcacgtgtgctttctttggccagggctgtgttaaatttgaaatagtttctaacacttaagcatcagatgattccactgtaataatctggatttcagaaatcagaagatctggcagccttgtgtctgtccctctggctgcctgactcctcaagctgtgtgtctgtggacctctttgggtaggatgtgttctccagttttccacagaactgctgctgcctacagcgttctaccctgactgttcatgcccatatgttctgtagctgagccggtagacatttattgttctgccagtaaatgaatgttttggttgaaaagtatgttgcactaggtgtgatatttggtacacaatagatggtcattaaatatttccctttttctctattaggctgctgatgatgtagtgaagagaaagtttaaatccaaatgatttcagccctgaactagaaagttctgtctcagtgggctgtatgatctcagaaaatcacttaattcctccattgctcagtgtttttctagggacactagagaatttggactagctgattctcagggtttcttccagtactgaacttgcctgaaaagtgatacataaccacacgcaaacttccatggggtgtttgaataaaaacttatatcctaaaaataaaataatgaagtatggattgtaagaacaattaggttaattacaaagtggcttaaaattaatgttcaggctgggcacagtggctcacgcctgtaatcccagcactttgggaggcttaggtgggcggatcacttgaggccaggagttcgagaccagcctgaccaacgtggtgaaaccctgtctctactaaaaatacaaaaattagctgggcacgatggcaggcacctgtaattccagttactcgggaggctgaggcaggagaatcgcttgaacctgggaggcagaggttgcagtgagccgagattgtaccactgcactccagtctgggcaacagagtaagactccgtctcaaaaaacaaaaacaaaaacaaaaacaaaattaatgttcagcgttgttggttagtaccaatctagaaaactgaagaatttaatcttttagccctgtgctgttgatttggataaagctatggggggcagggatatcaatataggagctattgtgaagctgggtgtgacagtcatatgatggatgacaggcccaggatggagagacatcttgatagcatggagcagtggacacaaaattgaacaaagatgtgtacacagtggtgtaatttggtttgaataaaaccaaccgaaaaagtaaagatgaagaaggaaataacaggtaaaacagagctagggttttagatgaaatgttcaatctcaagtgatatatatacatggccatcaatgtgtcatataaagagaatattaggatttccatttatgtttatttaaataagcaacttttcaatttgtgtgtgtgttgaattacataacaggatggtactacataaataaaacaaaacatgcccttggggtattgatgtaatcttttttttaactaataggagagtgtgatcaaaagtttgcaggctgctggattggaagttctgtttgttgaaaggtagcatagtatagtggaaactacagtctttaaaatcagatagtcctgaatataaactttaactttaacacgtaatacttatgtaacataacttaatgagcctcactttcattgaatgtaaaatgtgtgttataatacttctctcataggtatgttggatggttgcaatgggatgattttactgctgtcttttggttaatttctctgttttttgtctttcatgtttgattctttagggctggagaatatacccagtataattttactcttttaaatttgttgggttttaaaaatgacccttaactgtccaatacaaagtgtatcttgctgaatattccatgagtgcttgataagaatgtgcattctttgtgttctgtaaatgtcagttagatcctgttggttgatgtcttattcagttcttctgtatctttgctaattttctatttaatagttctatcagttgctgagaatgggatgtttggtccccatgatgagatgagtttttaccattaatttttaaaaatgtacatctgtgtctggccttgtgtgacccagagtggtcagcatagtatagaaggaatgcaaagaagctgtagtgagagaatagccagcttcatataggagaaaatgttctcatgctatgatttcccatgaattcagtagcagagtctgtcatcattagctttccggggtttgtagaaatactatcatgcctttggcctcgttgttattattgagcaaccttgcatactggaagctccagtgccttctgtatacaatgagctggattaggttagttttctagtatttagtgactctttcagtcagatacagactcatgtttgaccccgtcttttggcatgttagcatgcagaattaacctgttttcacattttgcagcagcacatgtaaaaatacatgctttcagttttttggccaagtctttttttttttttttttttttttgagacagagtcttgctcttgtcacccaggctggagtgcagtggcacgacctcagctcactgcaacctctgcctgccgggttcaagcaattctgctgcctcagcctcccaagtagctgggattacaggcatccgccaccacgcccagctcatttttgtattttttagtagagacagggttttgccatgttggccaggctggtctccaactcctgacctcgtgatctgcccgcctcccaaagtgctgggattagaggcgtgagccaccgtgcccagctggctaagtcctttttaaataaacctcttggggaagatatattctagtggaaaaggaaggacattaagtaacaaaaaatatcctcaggctttgggtcttaacaaagcagtcattcttgaaaagccactttttatttctctattcctcattttctagagtaactcatcaagttcttttaaataaatgtgtctgttttaaataacagatggctggaaaaataccccagctgagaattgatcttttagttgttgattttagtataaaacagttacattgactgtgatgattgttatgttgggatttatatccttcagtttttttgtattagatttgcttttttactgtttattaatgctttccttttgtctgctttcctcctattaaaattttttaaaattattttccctctactggtttggccattatgcattctgttagactgaaattttaacacacatactctgattaattttacaaaagatgtatctgggttttagtaattttgtgaatcaaagaactgggaatttattatcatatcaaaaaacgtgaccactcagggttctgaaatacggatttattgttgttctgtgactctagtccgtttcgtagctacctgctaattgcattattattaatggttctggagaatgatccatcatagagatgtcaaggctggtataaatttactgaggaacaatttaatccatgcttcagcaccgcagactttttgttaacagatccacaattaaagtgaagctgctgccagttgttgaacttgagttagaaactgcaataagccacaggaaaagaagcaaaaataaacctcttttcagatgaaattgaaaaatatctattggaataacatgaattaaagacttgtcacttcatgaacttattgttctttttttcttttttgttatggagagagacacttctctagtctccatttcttggttactgtcaccaacagtggcagttttagataaaataatgtcgagggagaagaatactgaaacgtaaaaatgtggtggtggtagttttatttttaaaaaatatatatcctgtggaaatagttttcagttttagcttcactgtatccaccctcctagcattaattcagtacgcctaagtgaagttgctagctgctaaagaaatagttggagtgctattcagctgtgaggctaaaaatctcgaactaaaacatggaaattgtttttctaatttcatttgggtaaaaatgaattcccgtgaatacatgttagcaaagcaagcttccttttattatttctcataccacagatacaatatccagaaatgtgttgatgtgaaataaaatcaaatcaaggtgattatcatgtggacattggatcaggattctggaatgttcagtttgtgggttgctttgcatttctcacttggagatgcactcacaactttatacctctttgccttagttttttgcactttaaaaatgagaagtataatgatcttgagctcacatggttgtcagacagtgaagaattttgaaaaaggcaagtttttcatttaagtgcattacatattaagaaattcatatcaaacttttgaaaaacaagtttgacaaaaaagcaagtgatagtggctctacaaaatgtacttctgaactttctatatgatgtatttctataatatatagaagtatatagaaatattctataatatagaaatatataatcatatagaaaattcaaaagtacattttggagggagtctggggatatttttcagccactttcatgtataatctttctttcctagcccttcttttttccccttttaattcactcaactgtcctagaggacagtgacattttagaggaaatttattcaaaccacaagggaatatttacgaagagtttctttgcttgaaaaaaaaattatttctttgctttgatattttaaagaaattgatacttttaaagtttcttttaattttaaaatgatgtcaaacttacataaaagttccacaggtagtgtgagatacttccatgtgtactctttaccttgattcaccagtgttcatcttttgcttcattgactttatcattagttctgtctccctcgtacacaaactattttttctctgaaccgtttaagagttcctgtagactaacccttaactgtttcaacgcatacctcctaagaataaggacattttcttatataaccatagtacagtgataagaaacaaaactttttatatccagtccacaatctgaacttaaattttgtcagttgtcccaataataacttttgtagcatttctctcctccactgggtccaggatccatccacttgtattgtgtttaattattatgtcttaagtttcttttaatcttgaatcattcttcatccttttttctttcgtgaccttgatgtttttgatgagtacaggcaaattattttgtagaatgtgtcttaacagatttgtctgctgtttcttcataatagtattcaggtgtttatttgcttatttattcattaacgtttattatgtcctcttggattctcatacagtgttataaactattactgtcaacatttattctgatgctcaaattgttacaaatctggccagtaagagccccgtcagcttaaagaatgatgtcatcatcgttctttacatcatacatcatcttgtactttttctgctgcatccttggaatcagccagtactctaaggacccctggttctttttactggagagtggtgttcaggtcttggtgctagatgtgcttattgctaccagaatgtcataacttttaggtcttcttggagatcaaagtgaggggaaaatacacacaaataaatatgcatctgtctgttcatccatccatccatccatctagttgtccgtctatccatgaaaaaccatgactttatactgatatgttcaatttcagtctagtaccacagggttcattgcagtagtcctcctttccatatttgtaactccaccgcctaagaaacatggctttattattcttaatatacctacttatttgctcacttttaacaaaaaatatttaaaatttctaccctacagcaccatgaaaaagtaacctaatgactagagtttagtgtttgcttatggttctttgtgtcttaggctgggggtatgtagtcaaagtactgcattcagaagttacttgggatagttccttttttcctctcttcaatgttactgtgttctttatttgaaatacagtaaagttcatatgtttctgttgtattccttttaccattccttcaccaatgcttgttgattttatttatttggatatatgaaacagtatggtttcaaaaatgaaagatgtccccagaaacattatgactctaattctttcagtttctctgctctgtttatgcagctcccaccctagttcctgttacctataggtaactggtatcattagtttttggtttatccttcttgtatttcttttgcaaaaacaagcagattcatgtgttttcttttcccactctttcatacacaaaggtaacgtgtgtgtgtgtgtgtgtgtgtgtgtgtgtgtgtatatacattaagtttgcttttttcatcagttcataggaagcattctcattcatcctaacagcttattcagccagttttctaaatattggcatttcacttgtttccagtagtttgcgattcggaaacactgtagtggataacctagtgtatatatatgtttataatattggaggtgaatattttgggtaacttcctggaagtaatattgctagatcaaaaggtaaatgtaagtacttttgttagatttgtcaaattcccatccataaaggctgtaccagttttcatttgcacaagccaagttgtgagaggacctatttctccacagttttgtcaacagaatgtgttgtcaaatgttttaatttttgctgatctgaaacatgagaaatggtattgcagcgtagttgtcatttgcttttattatgtgttaagttgaagagttttcatgtgataaatacaatttttagatcttcatttgtgaattgtctgtgtcttttggctgttttttacatggtgtttatcttgtcttttaaacatatttggtatatatttttagtgttattggctttttaactgtgatacatgttgcagcaaatacttttttctagcttgtcgtgtattcttttttgattgggatataattcacataccataacattaatcctttaaaagtgtacaattcagtgatatttagcatattcacaagattgtacagcatcaccactagaaaatgttctaattctagagcattttcatcttcctaaaaagaaaccccatgcccactggcacccactctcctcaacccacaaatcccctgacagtcaccatactttcagtctctagggatttgactactgttttttatgtctggcttctttctcttagcatagtgttttcaacatatatgaatatgttacagatgcatcagtacaacatttgtttttatggcagaataatattatatggatataaaacattttctcatcagttggacatttataatgtttccactttttggctattaagaatgatgctgtcatgaacccttgtgtgcacgtttttgtgggacaaaattttcttttttttgcatataccttgaggtggaactatcgagtcatatgataaatttatgtttaaccttttgaggtactgccagactgttttccaaagcagttgtaccattttacaattttggcagtgcttgagagtttccatttctccacatctctaccaatacttgctgttgtctgtccttttgactataaccatcttattgggtgtgaaatggtatcttattgtgatttgatttgtgtttctcttaagactaaggatgttgagcatctcttcatgtgcatattggtcatttgtatgttttatttagagaaacgtcttctttaaatcctttgcccattttaaatattgagttgtttttattaagtttatatgttctggacactagactcttgtcagatatatgagctgcaaatattttctcccattctatgggttgtcttttcatgttcttgatgatgttctttgaaacacaaagttttgatgaggtccagcttaccagggtttttgtttttgcttttcttcatatctgagaagccactgcttaatccaagtttacaaagactaatgacgatgttttcttttaagagctttatagttttagcttttacatttaggttttaaatttactttgagttaattttgtgtaaagtgtgtggtaggtgtccagcttcattcttttgcatgtggatatccagagtcccatcactagtttttgaaacgactgttctttcctcattcaatattcttggcatccttgtccgtcaacaatcagatgcccaaaaatttatggatttgtcatttgtcttttgagattgcttatgattttttttggccatgctcaagtttgaatatttgtgtagctaaatttatcaacattttgcttatcttaattttgagctaaagaaagttttttcctacacttaagttatgggggaattcacccatgttttccccttataattctgtcattttcaaaatggctgttcttttgtctcagaaccatttattttattttattactttagaagcagggtctcattttgttgcccaggctggagtgcagtggcacaatcgtagctcactgcaacctcaaagtcctggactctggtgatcctcctacctcagcctcctgagtagccaggactacaggtgcatgccaccatgcccaagtagtttttaaaatttttaatagagatgaggttttgctatgttgcctaggctggtctcaaactcctgggctcaagcagtacccctgccttggcatccgagagggctgggattacacaggtgagtcaccatgcctggccagaatcatttattaaaaatccatttcactcagtgatttcaggtgccacctgtagcatatactaaatttgcatatgtatatgagtctatttttggacttcaaagtccgtttctctgtttatgtaataccatgatttttttaattaaaaattttattttgtgttagttttagattcatatgcagttgtaagaaataatacagagattttctgtagtctgtatccagttttccccagtggtaacatcttgaaaaacggtagtatggtatcaaaaccaggatattgacattgataacagtctacaggttttttgcagtttacttgaactcatttatgtatatatgtgtgtatttacttcggtgccattctgtcacatatataggttcaagtgttcaccaccgcagtcaaaacatagagcagtttcatcactgcaaggatcacttatgttgctcttttataaccgtacccacttcctctttcatcttccctagcctctggcaaccacagaaatgttctccatttctgtaattttgtcattttagtggcattagaaaagcagaattatacagtatacaatccttagggattggcttaaaacatcttttctcagtgcagtttcttggagatttactcaaattattgcatgtttattgttgagtagtagtgtatggtatggatggaccagtttgtataattgtttagtttttgaaggacaccggggttggttctgggtttatactcataaataaagctgctatgatcacaggtttttgtgtgaacataagtcttccacattcctctgagataaatgcttatgagggtgattgtattgaagtggccttgttttctggggtgacgctcagaattcttggtctcatagccaaggaaatcaaggacatggatacaccaagggtgaagtttagagcagaaatttaataggagaaagaaaaagaacagctctctgctgcagaaaggggtcccagaaaaagggttgccatcctgtagtgaaatacaggaatttttacagacaagctagtggggaggcagtatctgaacatagggtgtgaaaaaccagttaggatcaggtgtgtcatctgcatagggtgcaaatctctggaagcccctaccccaatcttttatcatacaggcaggtcctcagcctgagctactccatgttgcttatttctttcttactgtgcatgtgctcaaaaaggggaggtagaatccccatggtggacatgcctggccccagctagccctttctgtccatgcaactgctggcatcccccagtgcaagcttccaggttccttatctatgtttgcagtctgatcttccaggctactctttgttagaaaataagtaatttcttgggctgctttttgttagaagggaagttctgcgaaggatgctgtgccctcactatctgcctcaatagttttttctacctcctgtatcatgataatggcatgtttagttatataagaaactgcgaaagtgttttaattataggggcttttcagcatgttttaatatctggtagggccaatagctcctaatagcttttcaagtattttccaagtttttacacaaaacagttgtattatgccagtgatatgtctttgtctaatttatcctacttataggattgcagatggaacaagtagcattttctttgttttcccaactttagctcttgactatctttagtccaacttggctggcaaattgtcatttaagtatgtcgcatttgcttgcaccttttctgaatttctcaattattctttttaagaaactaaaattatgaaagtttttttcctctttttattcatttcttatctacttgaaataatgggacttacatatacatcagtgattctcaaatgttagtgggtaacagattcacctggaaggcttattaaagcacagattgctaggccttgccccagagactttaattcactaagtatggggtggggcctgactatttgcatttctgaagcaccaggtgatgctgaggctgctggcctgggaccacattttgaggactactaggctatattagtagaatggcttatggagtgtctctgagaagattgctgggtcttatgattgacattatatttgaatgattgtgtaggacagatgtcattatatctgtactgctaaagaaacaagatatatgatgctggtatctaacagacttttaaatcttagtactgaaaggagatagaaaagttcagcttttaagtcattcatttatttaatctttaatttattcatcagattttattgcttccaactacatttgctaggcagtgaaatggtttctgttttacacaatgaggaattttttttttaagaagagttaaatatattttctaaaattctatatttaagaatcagaaagttactggagattaggaagggtagtgtgtggcagggtgaggggaaggttatgaggcgataacacgacaaggtgactgtagtcaataataacttaattgtacattgaaaaataactaaaacagtataattagattgattgtatcacagaggataaatgcttgagtggatggatattctattttccatggtacgattatcactcattgcatgcttgtatcaaaacatctcatgtaccccatacatatacccatctattatgtacctacaaaactaaaaaaaattataaaagcaaaaaacaaaaacgaaaaaagcccttgactttcagaagcctctgactaacctttgcagtattgtgcctctgttctacacataattaactgtgttgaaactgagaattaaagctgaaatgtaatttcacaaacttaataaatggcctttataactgataatgacatcttcgttgccttgagacaacaaccaaggacttgatttccttgagataaggactttggttgaatcagtatgtctttaagtatttaatcttgtctcataataattgtgttacctcaacaaagattgtactcataccttgacaaatgaaaccataccagtaaattaattctatttaagtcagagtagaatcaactagcagttacccactgactaatatcagagcccagtgtgttacatgaaactaaattggaaaccgacctctggaactcaatgttttgttttgacctaaatctactctgcagtgtgaggtaaatacaattgtttaaagattcttaagctgtcgatgttgaatttgcttattttgtatttaattaaaaaggtgcatacagatatgtatgtagtgtggtttggcaatagttaaaattgggagcaggaaaggaaaattttagaaatcttggtttccaggcaaccaaacacacaatatcatatctgtgtaccacttgcttcatgttaagatgccctaaatgtaaataattgatggagcagagactaaaagaaccattatagtcagctgaattccaaggtccttgacctgagctcattaagctcaggttagagaatagggtggctgaattttcttagaaaaagagcccagataatatctggcatgtacatagatcttgaaaattagctggacttaagtaggcatttagttttcaagctttagtttagtgaatgtggggatcctgatctgtaatccttcaggaggcaaatgagctgcaacagagccatggtttctctccctctttctgggagccacccacccccttcacccaatacagaggacctaaggagtgattgattttataaaagatacagagtaacacactctgtatattcatcagaccgtgtaaataactaacttctagacctctcagatataaatacatctctttttacttcagaagctttccatgggtgatttcatccatgttcgtggttttaactcttgtgcttatatgaatgacttccaaatgcatacctccagcctcattctgtttcagaattagattttcgtacattcataggcccaactcaaaatgtctaaagtgaattaatctcttagctgtcttctcctccagagaagactactgcctgctctgctctgtcatgtcttgggtagtatttggcagtatcactcggctctttgatttcttgccctgttacccttacacgtggctgtttgccatggtctgtcaattctgcttcaatagtcctccctaataaatcttccctctcttctactcttagagtctctcaccttgactttttttttgtttgtttgtttgtttttgagacagtctcactttgtcacccaggctggaatgcagtggtgcgattatggctcactgcagccttgacctcctgggctcaagcaatcctcccacttcaaccttccaagtagctgggactacaggcacgcaccaccatgcctagtttttaattttttttttttttttatagaggcggggtttcatcatgttgccgaggctggtcccgaatgcaggctcaagcgatctgcctgcctcccaaagtgctgggattataggcatgagccaccacgcctggccttcactttgatcttgactcatctccctgtccctgatctttgcctgctcaagtccatcttctatacgcaaccatgattttctttagaaacacatttctgaccacattgttcccctttaaacacttggatgatgctttgtcaccagcaggataaagtctgagctctttgacttgacctactagccagccatgatctccttgtccatcttgatgtcttgccattccccaaacataactttagaatacagcaattcagaactgcttttagttccctgaaaccaccataatgcttcacacaccctcacctgtgattgtgctgttctttcttactcacccttgagtctttattaattcttttgctttcaagactttgctctggcttttctagggtgcctcccttgatttcttttgctcacccatctgctgccatcccagattatgtcaattgactctaccctaaggtctccatagggcatcctgtgtctatctctatgatagatccttgcccactttattgaattcatctttaagctccttgaatggagggtctgtgttttatttctctttgtttccctctttccttgtgtggctcttgaaatcattatgaattgatctgagcacttccttatggaggcatgcagaattaacagcataattgtggcaagaaatgtctttgccttttctttttaatgcaaatgagagttagtaacatgttctttgtatttatcttgggtatccattgctgactaccagatcaccagatcaccccaaaactaagcagcttaaaacaataaacattttgtgtgtatgtgtgtgattttatttatttatttatttttttaagacggagtctctctctgttgcccaggctggagtgcagtggtgtgatctcagctcactgaaacctccgcctcacgagttcaagcgattcttttgcctgaacctccttagtagctgggactacaggtgtggcccaccatgcctggctaatttttgtttttttagtagggacagggtttcaccatatcgcccaggctgtgtcaaattcctgacctcaaacaatctgcccaccttggcctcccaaagtgctgggattacaggtgtgagcctgcccaaagcaatgaacatgttatttgttcatgattttgttggaaaatcatgggctcatgattgagttgggctcagctggatgtttcttctttttgtctttttaggggtcactcatgggtcctcattcatctggtcgcccagctgaaggtagaaggtctagaatgaccttactcacatctctggcaatttgttgctggctgtcagctctgcctccctctctcatccttaaggggactggccagggtttctttccatggcagtctcagagcagcaagagactaagggtgaaagttgcaaggtctttagaggcccaggcccgggaagtgtacagtggcagttcattaacattgtcttggccagtgcaagtgaccagaccagcccagattcaagggatggggagtagacttcatctagataggaggagccaccaggttacattgccaaggggtgtgcatacagggatgggaggaatgtgattgtttgttgctgtcagcacagtataccttactagaactgaattgacgtctctactttttgagcattttttgtacattgttgtggtatttctttgtggtagtcatctcacatgctttaaacttcgtatgtcttatttccttccttagtaggtcacattgggagctcatcttccccttcacttaggagacagtgcaataaacatttgtatctctcatagcacataccagatttttaaaatttggcgggttttaattcaggacttaaggggtgaattatcttattaaataaataactcaagtatacagggaagtgaaagacagtcatttacctaatgctctgaacatctttcttgagataaagtagtgctgtgaactgataaagttcacataaagctaaagaaattcctttatgtattaatattacaggcatttatgtaatatcagtatctgtctgaaaagaatgcattgattacaaaactctttaagttgtacagaagttatttttccctagaacttcaaaagtctttgctctgcaagggaggggagagtaaaaaaggtgccttaaggatgtagacatgctgtatccagcactgttatttgttgtcagaaatatactgataaacatgctaatgccaggccgggtgcagtggctcacgcctgtaatctcagcactctgagaggccgaggcgggaggatcacgaggtcaggagattgagaccatcctggctcacatggtgaaaccctgtgtctactaaaaatacaaaaattagctgggtgtggtggcgggtgcctgtaatcccagctactggggaggctgaggcaggagaatcacgtgaacccgggaggtggaggttgcagtgagctgagatcgcgccactgcactccagcctgggcgacagagcgagactccgtctcaaaaaaataaaaaaataaaaaaaatgctaatgcctttcttgcatattggatttggtctactgatgactttttttcctggagttcttagaagctgtgtgtaaccaaagggggctggagagtgagagaaagcaaaagatttggctagaagaagggagagaaatacattctggtttaggggctatgggtagacctaagtttttaccctgcattgtatctgaaaaacataaatccctgctgttaatcttaatatctaatcttagtctttagtgtctcttccttttcttttttccttcccttctcctcaacttttctacaaaaatatttatgcatctaaaatgggaagaattatttttgctcagactgtaaaaagtatatcacaggctgggcacggtggctcacgcatgtaatcccagcactttgggaggccaaggtgggtagatcatatgaggttaggagttcaagaccagcctagccaacagggtgaaaccctgtctctactgaaaatactaaaattagctgggcatggtagtgggcacctgtaatcccagctactctggaggctgaggcaggagaatcacttgaacccaggagttggaggttgcaatgagctgagattgcaccactgcactccagcctgggtgacagagcaagactctgtctcaaacaaagaaacaaacaaaaagtatatcacaaatattgttacatattcttctttaatacataattatgcatccctgaaagtggcattttgctacatagcctcaatatagttttcacaactcagttttgccctcttaaaacaagattgctggcaccatcttcactgatgaaagacttgtgtctaagaaggtctgagtcataacagatgcttctccatcttgctttctcatctttctctagtttctttttgtcctttttatctttttatattatttttctcttctccataatactgctttctaccctcttattggggtgtctgctctatgtgccaaatatgccataaattccttcatcttggcttccctcgggagagactaagagaagacactgcagaactaggtctgctcagaggagatcatggcctgccctcatgggaccatttggcgatgtcttcctccatcacgcctgcagtcactcctgtggacttagaggttgagcaagattttctgtcctgagagaacccacgttcatattctgacttggtctctgtgaagatttgaaaaacatttttttttcctgaaaagatacagctgtacccattgaagcaaacgtggaactctgttcattattttctcctttttattcattctcatgttcacattcactgtataatcttgtttgtggcttatctttgacttttatacatactacatagattggacaattttcctggtgatacggtactctcacattgtgaagggatggctcaatattaattttagagtggatgctttgaaatattatcaatgacaagattttagcattttataaccttcaaccaagcacttatttgggggtctgcaacattccccttatgcattaaatgaatgaatgattattttatacaactcacaccaaatctctttttttaaactcatgttttcacttttattttttgattacttgtaaaagaatgctattcttgatctactgttacctactgtttaaattgtatggtatatatatatatatatatttatactttaagttttagggtacatgtgcacaacgtgcaggtttgttacatatgtatacatgtgccatgttggtgtgctgcacccattaactcgtcatttgcattaggtatatctcctaatgctatccctcctacctccccccaccccacaacaggcccccgtgtgtgatgttccccttcctgtgtccaagtgttctcattgttcaattcccacctttgagtgagaaaatgcggtgtttggtttttgtccttgcgatagtttgctgagaatgatggtttccagcttcatccatgtccctacaaaggacatgaactcatcattttttatggctgcatagtattccatggtgtgtacgtgccacattttcttaatccagtctatcattattggacatttgggttggttccaagtctttgctattgtgaatagtgccgcagtaaacatatgtgtatgtgtgcatgtgtctttatagcagcatgatttatagtcctttgggtatatacccagtaatgggattgctgggtcaaatggtatttctagttctagatccctgaggaatcgccacactgacttccacaatggttgaactagtttacagtcccaccaacagtgtaaaagcgttcctatttctccacatcctctccagcacctgttgtttcctgactttttaatgatcgccattgtaactggtatgagatggtatctcattgtggttttgatttgcatttctctgatggtcagtgatgatgagcattttttcatgtgttttttggctgcataaatgtcttcttttgagaagtgtctgttcatatccttcgcccactttttgatggggttgtttttttcttgtaaatttgcttgagttcattgtagattgtggatattagccctttgtcagatgagtagattgcaaaaatgttctcccattctgtaggttgcctgttcactctgatggtattttcttttgctgtgcagaagctctttagtttaattagatcccatttgtcaattttgtcttttgttgccattgcttttggtgttttagacatgaagtccttgcccatgcccatgtcctgaatggtaaagcctgggttttcttctagggtttttatggttttaggtctaacatttaagtctttaatccatcttgaattgatttttgtataaggtgtaaggaagggatctagtttcggctttctccatatggctagccagttttcccagcaccatttattaaatagggaatcctttccccatttcttgtttttgtcagatttgtcaaagatcagactgttgtagatgtgtgatattatttctgaggcctctgttctgttccattggtctatatctctattttggtaccagtaccatgctgttttggttactgtagccttgtagtatagtttgaagtcaggtagtgtgatgcctccagctttgttcttttggcttaggattgacttggcaatgcgggctcttttttggttccatatgaactttaaagtagttttttccaattctgtgaagaaagtcattggtagcttgatggggatggcattgaatccataaattaccttgggcagtatggctattttcatgatattgattcttcctatccatgagcatggaatgttcttccatttgtttgtttcctcttttatttcgttgagcactggtttgtagttctccttgaagaggtccttcacatcccttgtaagttggattcctaggtattttattctctttgaagcaactttgaatgggagttcactcatgatttggctgtttgtctgtttttgctgtataagaatgcttgtgatttttgcacattgattttgtatcctgagactttgctgaacttgcttatcagcttaaggagattttgggctgaggcgatggggttttctagatatacaatcatgtcatctgcaaacagggacaatttgacttcctcttttcctaattgaataccctttatttctttctcctgcctgattgccctggccagaactttcaacactatgttgaataggagtggtgagagagggcatccttgtcttgtgcgagttttcaaagggaatgcttccaggttttgcccattcagtatgatattggctgtgggtttgtgataaatagctcttattattttgagatatgtcccatcaatacctaatttattgagagtttttagcatgaagggctgttgaattttgtcaaaggccttttctgcatctcttgagataatcatgtggtttttgtctttggttctgtttatatgctggattacgtttattgatttgcatatgttgaaccagccttgcatccctgggatgaagcccacttgatcgtggtggataagctttttgatgtgctgctggattcggtttgccagtattttattgaggatttttgcatcgatgttcatcagggatattggtctaaaattctctttttttgttgtgtctctgcccggctttggtatcaggatgatgctggcctcataaaatgagttagggaggattccctctttttctattgattcgaatagtttcagatggaatggtaccagctcctctttgtacctctggtagaattcggctgtgaatctgtctggtcctgggatttttttggttggcaagctattaattattgcctcaatttcagagcctgctattagtctgttcagggattcaacttcttcctggtttagtcttgggagggtgtatgtgtccaggaatttattcatttcttctagattttctagtttatttgtgtagaggtgtttatagtattctctgatggtagtttgtatttctgtgggattggtggtgatatcccctttatcattttttattgcgtctatttgattcttctctcttttcttctttattagtcttcctggtggtctatcaattttgttgatcttttcaaaaaaccagctcctggattcattgattttttgaagggttttttgtgtctctatctccttcagttcttctctgatcttagttatttcttgccttctgctagcttttgagtgtgtttgctgttgcttctctagttcttttaattgtgatgttagggtgtgaattttagatctttcctgctttctcttgtgggcatttagtgctataaatttccctgtacacactgctttaaatgtgtcccagagattctggtatgttgtgtctttgttctcgttggtttgaaagaacatctttatttctgccttcatttcgttatgtacccagtagtcattcaggagcaggttgttcagtttccgtgtagttgagcagttttgagtgagtttcttaatcctgagttctagtttgattttactgtggtctgacagacagtttgttgtaatttctgttcttttacatttgctgaggagagctttacttccaactatgtggtcaattttggaataagtacagaactcacaccaaatcttttaactacccatgcttctagaagctttcaaggaatcaaaaaggggctatattaaaatgggaaaaaataggaagaagcttagaaataattttaggaaaggtattacgtttaagcatagaactaagtaggaagaggtaagtggcaaaacaacaataacaacaacaaaagagtctaatcagtatgtggtggaagactactacagtgagtagtactttacagtgttaccaattaatgcttgtccttttttgttctctttttctttgttgtcattgtattttccgctgtctcttgatttatcagcaaaaatacaggcacatttctaaatttgtgttagggtttcctgtagcatggtcatatgtcaccagtgagtcctctgactctgaattaagaaaacatgggcttaatatgcagaacactgaaactggaccccttccttacaccttatacaaaagttaactcaagatgggttaaagacttaaatgtaaaaccccaaatcatgaaaaacctagaagaaaacctaggcagtgccattcaagacataggcatgggaaaagacttcatgacaaaaatgccaaaagcagttgcaacaaaagtcaaaattggcaaatggaggatctcattaaactaaagagctcttgcacagcaaaagaaactacagtcagagtgaataggcaaccaaagaataggagaaaatttttgtaatctacccatctgccaaaggtataatatccagaatttacaagaaatttaaacaaatttacaagaaaaaaccccatcaaaaagtaggcaaaggatatgaacagacacttctcaaaagaagacatgtggccaacaaacatatgaaaaaaagctcaacatcactgaaaaaaagctgaacatcagtgatcattagagaaatgcaaatcaaaactgcaatgagataccatctcacgccagtcagaatggcgattattaaaaagtcaagaaacaatagatgtgagcctgtggagaaatgggaacactttcacactgttggtgggaatgtaaattagttcaaccattttggaagacagtgtggcgattcctcaaggatctacaaccagaactaccgtttgacccagcaatcccattactagatatatacccaaaggattataaatcattctaccctaaagacacatgcatgcatatgttttttgcgtattattttcaatagcaaagtcatggaaccaacccaaatgcccatcagtggtagactggataaagcaaatgtggtacatgtacaccatggaatactatgcagctatgtgaaggaatgagatcagatcctttgcaggggcatggatgaagccagaagccatcatcctcagcaaactcacacaggaacagaaaatcaaacactacgtgttctggtaagtgcgagttgaacatagagaacacctggacacagggaggggaaccaacatgcaccagggcctgttgtggagggaggcaaggggagggaacttagaggatgggtcaataggtgcagcagaccaccatggtacacatatacctatgtaacaaacctgcatattctgcgtatgtatcctggaagttaaagcaaaattaaaaaaaaaaaaaaggaaaacatgggcttaaataggacacaagatctattcctcctttgaaaaacccattaagtttggataaattctaagaggtagcattttaactagcatcctaagcacttcctcacatgctcatagtttgcaagttaacatgatgtatgtgtatttgtgtatttcaaactccggaagcttttgtattattgaaaccaaaactgacaagaaaccttctgtgaacatgcttctgctggggtgtagaaagctcacagagtgttgccttcatgcttacaatagtaaaaaatccagatagtatacaaaatgacttttcttggtctcatcagagaatttcggtcatagagcaactaactagcctgaaatctaaggaaaaggtatgagtttccaagtagacaggacaagacatttgcttaactggagtaaatgctgatgctgatgtcacataagctagtaagaaaaagactgagttatgttttaagtactaaaagctgaatgtatctcagcatgggacctgcagctgcaaggagaattcagttacatgcaggcagttctctacagacctcaccttgtgctcatggggaacactgggggcaaggcaagtgatggaagaatggcattcttatggaggcaagcagcaaccactgcaagaaaggcatgaagccctctggatccttctctaaccctgtttctcttgtggaacaaaagccttaagctcctgggggaagggcggcaaactctaggctcaggggacaggtggagacctatttcagctaggggaaaggaacaggaaaattgctgtacctttggaggagggtcaaagaaatattatccactgggactattagagatctcctaacattgtgggaggaggtagatcacttggaacgtcctacccctatacccaggcaaacggatcctgcctaagactgaggttgaaccagaacaagagaatacttcctctctacatacaccaggatgctaagctcagagtaagaaatgctgatggtctactgctaggggagtggggagaacatggagaaagacctccctaaggtacaggcacaaagggaagacctaaagctgagggtgaagcagacattgagaaaaacactgtggcaaaccagccccaactgaagaacagggtgacgccaaggacacatgaaacctgtgatgtgcagaggctaataagcctaaattcagctctcaactcctgactcctgactaaattgaatcaactccccacacttaagattagcaggatgcgagacatgttcatttccaggcacaaatactacatacctcagtctctatagttctgcacaagatggctggcttttaaccaaaaattactgagatgcacaaaaagtgaggtaaaacaacacacataaaagaaacaaagcaatcaatagaaccagactcagatatgaaccagatgttagaactatcagagaattttaaataactatgatcaatatgttaaaggttctaagtgggaaaagtgggtaatatgcatgtacagatggggaatttcagtagaaaaggtgagattacaaaaaagagtgaaatgaaaatgctagaaatgaaaaacttagtaacagagatgaacgatgcttttgatacctccttggtagaattgatgcagttaaagaaataatcagtatatttgaagattggtcagaagagatttatgggaaatctgaaacacaaagaaaaaagagggtgtgacaaaagacccaaaaatgttagagcccctaagagctttagtacaatatcaaaagttccagtgtatatgtaattagaatcccagaatgagaagtgagtcaatagtgtggtataaaatagtgcaatacaaaaaatatttgaagagatgatagtacagttttcccaaactaatgacacataccacataagaaatccaataagctcactaagcagaatgaataccctgcaacacacatacagtcagacatattgtattcacactgagaaaaaacaaaatttcaaagtcaaccagagaaaaagacacattatatacagaagaagaaagatgagtcaaagcagacttctcatcagaattaggtaaggttacagtgttaacagaataaactgtcaacccagattcctatgtccttcaaaatatccttcaaaatgaaagaaagcaaatataagtgatcttattactcttcatttcactgccaacatttaaaaatcaatggaaatgaagataaggctctggtctcaaccacattgatctgaactgacaactgcgataaataagcagtgtgtcttgatttatgaatttgtctgtgatgtttgagttttgtttaatcctaatacatggtatagctttggtggtttttaagggtggtgtacttggtacctatatcagccaaggttttctagagaaacagaaccagtggaatggacaggtgtgtgtgtgtttatgtctgtgggtatatgtatatttatgagtggatggaatcaagagatttatttcaaggaattggatcctgtgatcttgggaactgacaagtgcaaaattcataggacatgtttgcatgaaaacccctcaggcaggaattggtgctgcattcttgaggcagtttctacttcttcagggaaaatattaattcttgcttttgaggactttcggttgattggatgaggtccccccacattactgacaataatcttcttaaagttgctgaatgtagattttaagcatatctacaaaataccttcacaacagtacctagattaatgcttaattgaataactggatactattgcctagccaggttgacatataaaactaaccatcacaggatccattattagaattgtgggaagacctaggttttcttctagggtttttatggttttaggtctaacgtttaagtctttaatccatcttgaattgatttttgtataaggtgtgaggaagggatccagtttcagctttctacatatggctagccagttttcccagcaccatttattaaacagggaatcctttccccattgcttgtttttctcaggtttgtcaaagatcagatagttgtagatatgcggcgttatttctgagggctctgttctgttccattgatctatatctctgttttggtaccagtaccatgctgttttggttactgtagccttgtagtatagttcaggacgtaggcatgggcaaggacttcatgtctaaaacaccaaaagcaatggcaacaaaagacaaaattgacaaatgggatctaattaaactaaagagcttctgcacagcaaaagaaactaccatcagagtgaacaggcaacctacaaaatgggagaaaatttttgcaacctactcatctgacaaagggctaatatccagaatctacaatgaactcaaacaaatttacaagaaaaaaacaaccccatcaaaaagtgggcgaaggacatgaacagacacttctcaaaagaagacatttatgcagccaaaaaacacatgaaaaaatgctcatcatcactggccatcagagaaatgcaaatcaaaaccacaatgagataccatctcacaccagttagaatggcgatcattaaaaagtcaggaaacaacaggtgctggagaggatgtggagaaataggaacacttttacactgttggtgggactgtaaactagttcaaccattgtggaagtcggtgtggcgattcctcagggatctagaactagaaataccatttgacccagccatcccattactgggtatatacccaaaggactataaatcatgctgctataaagacacatgcacacgtatgtttattgcggcattatccacaatagcaaagacttggaaccaacccaaatgtccaacaatgatagactggattgagaaaatgtggcacatatacaccatggaatactatgcagccataaaaaatgatgagttcatgtcctttgtagggacatggatgaaattggaaatcatcattctcagtaaactatcgcaagaacaaaaaaccaaacaccgcatattctcactcataggtgggaattgaacagtgaaatcacatggacacaggaaggggaatatcacactctggggactgttgtggggtggggggaggggggagggttagcactgggagatatacctaatgctagatgacgagttagtgggtgcagcgcaccagcatggcacatgtatacatatgtaactaacctgcacaatgtgcacatgtaccctaaaacttaaagtataattaaaaaaaaaaagaattgtgggaagatcgacagtggaatctttgcaaaacaatggaattgcaactgtgaactacattttgattgtttgtatttttagcggagtgataagaatgatcccagactgaagatgcacattaaataagctggtaatagtaagaatttaagatgtaaactagcattaaaaaattctaagcctttaaatatgctctctcacattaagtgtatgctttgatttttcttataatcatttcatcatctagaaccatttaaattttgagtttttttcaatccaatttcacttaagcagttacgttttcattgaaatcattggattagcagaattggtacaaggtattgaaagtttgcagttcactgtgacttcatctgcaagtgaacaagtattattttgggattttgtgagaacaggagagccttaaaagtcattgaagtacagtattgttgcagatattggaggaggagtatgctgaatggtaacactgagactgtttttgactctgtaacagggtacataggttcaatacaaacttttttaagtgcagcaaaaaaaatttcaattgtaaatacaattgtcaacatacagcatagtggagttaaaaaagcatgttcttcatagtatagtcctgaagttctaatgataaaaatcagaatgttaaaaacaaactataacatacatatagttgaactgaaaatcatgttccctatagaaaataatggtatttctttgtcctggtgataaagtttaagtcgaggatttgtctttgccccccgaaaacattattttgctgactctgataatcatacttgttaaaccagagagaaacaatgatggatgtgaatctcaaggcagtatggggaaagggtctcaaagaccacttattatctgaggcatacaatttagaaagtaattatcatatttgttaccatggcgaggattgctgcctacagccagttctgttatgtaacaaaattcatttaagagatgcctgacagtatgtttctgtaatgctctagtatttaaaaagtaagggcaaagattgtgtctcatagttcagtatcatagtagctctttttctagtatacaagttagccttctgctccctgctttcacctaagttcatcttttccagtctctgtctacttataaaattaaaatacctctgaacttgttttgaatttgttatgctacttagcaatgggtgcctcatgtcgaggtgtaccaagattatctggttctaaccattgagttcaattttatgggagactcagcatcacaatgtggcagcctttttggccaaattttcaaccactggaattgccttttggggagttattttctgtttacgtagtattttctatagcttgctttgatcaacggtgaaaaaaaatgtagtttgggatggaaaatgggtgaaaggagaatattagatataagagaagtaacgtactgtttaacaggtgaagctctggatacattatttataagcaggagaagacaaacgaaaataagacccagtgtgaaaaaaataacagagatcgtgagcacacctagtgctcagctctggtttccaataccatccttcagtaaaaggaaccagggcacctcggagaaatggctgattctagtatgggggcaggaagcatgcaagatgagcctggagcattttgtagtgcgagagaggaaaggggtgctaaagaataaaaactccagagaacatgctgatgggagtatgtcaaagggatacagaagccagctcaaagagctcctaatggccaaagacagaaaaatttgaacagaaaaataacatagtattggatcataacctgacgtatcaaataaatatctatgagttcatactgatggaagtaaatgatgggataaattaataaatgggggagaagacacatacttcctgtgcagaggaattgcaaattatgcactctgttctagcatacctgcccactctttaagtgtgacatgctcatagagacttcctcttgaagcatacagaatggagagggggtgcagtgggagagtcactttacagtggagaaacccacacacactaccccagccaggtgatcaaggtgtacgtcatcaacagtgataaatcatgttgatagtgtgttcccttaatatgatgtgatgaaaatggcacttcacctctgtggtcttcctcccttaaactcccacctctagtctcatcatgagaaagaaacaccagaaaacccccaacagagggtcatcctataatatacctgatcagtactcctcaaaactttcagggtcatcaaaaacaaagaaaagtctgagaaactgtcaaaccaagaggagtctaatgagatacgaaaactaaatatgtggcaccctgaatgagttcctgtaacagaaaaaaatggccactaggtaataaagaagcaaatctgaataaactgtgcactttagttcataataatatatcaatattgactcgtcaattgtaacaaatatgccatattaatgtacagtgctaataagaggggacatacacattttaaagcccagtgcagatgacccctccttttgagtgtcctcaccatagcctacaaggccccatgtgatttggccctttcatctctctttaattgcatgtcttagcccctcctccttagcactgtccctgctactctggcctggttgctgtcccttgaatatgcaaggttattcctgcctttcatttgccatttcctctgcctgaatcttcatgtatatcgtttatttcatttaggtctttgggcaaataccacctcattagaaaagcctcttctgaccttcctgattataatagtatctcctgcagtctataaccacaaaacttgtgttctttgtcttcataatactcagttactgaaattatttatttattttaacttcttatcccactagaattaggcacatgaattcggggactttgttaattctgtttgttcctctgtctgtagcaactagaacaactccaggcaagtggtaggtagcactgagtaaatatcatgtgaatgaaagaattctcaaattgtgccccttagtttcctctgaatgcttaaccgcacattctgtgtgactcttggaaagattgttctctgctgtgtgttatctttttgtgcctgtatgagactttgtttcccttctggattgccaaaactgcagcagttgtatacctctgatttatgtctacacccccacaatatctagctaggtgcctggcaaaaagaagtgactgctcagtagcgtttatgggataaacatgtgtttctgctttggacctgtccttttactgcattcagcattcccccgggcgaggcctcaggcactgcataaaaagttgaatatgtctgactttgtttttatggactcctccaagctttatctccctatccactatctgaacttcgtgctgcagctcccttgattttgacctctttggctttggtcttggtttcccccacatcacatgtcctctttagacttgacaacatcactcccatttttaaaaacaaggccctgacctagacatcccataggatctcgcctcattctgctcaaaaattatgttgatgaggcccaccaagctcctgtggccagctaagcccaagacaggtgttaggacctgtgagtggaagcccagtggtagaaatgtgcactgtggcttgcatgtggcaatctacctaatgggagaattactctctctccattctttcctagcccgtcacatttattaagaataacatgaaaagtgccgggtactaggggcacctatgtgaataaaatacaaaggctgaagaactcatagtggaaacacatggtctccatatcatgagaatcattatttatcctctagaaggccagggaatttgttcatgaagcttaacccagagtcctcttgtctacttagaagatcttgccagaatgggttacagacatagtgattagctggaagtaaacagacttctgcaacctagccttcaaaaaccttactaccgaagtgtggcaaatattatacttttaaataatttcttccagtggagaaaagggcatgctttgtgaaacagagacttctgaaacctcttattaccaataagaaccttagcatgctagggtaaagttaatgatgaattggtctcggcaggtgccacaggctagattttctgccatttagtttttgtgtttctcacttgccaaggggtgactgagtgtttttcattgtttatttcctgttccagttgttgctttatagctttttccagttttcttctttctctttgagacataaattggtcttttaattcctactaaccctaattctacttttattttatctatcagaaaatattgccacagttatcaataaaaacattggaaagatgtgttttgtgtgtctcttttaaatttgttggacagataatagaaaattagatagtaatatattgcttagaaaaacgtacttaggacatttcttgctaaccttaattttttgggcggcctacaaacaaatccctatctaattgatttttgtcagggtttataacgttctaagcctgatcttcagttgatttgcgtatgactcccacatgttgaaaccaaaacactcagtttattgaacatatgaaataagactggatttttaaaaatctgcaaattgagttgctttcttctagctctcaaaaaattgatgggatttgcagtcagagaagattttacactaacatagttggtattttattaaaagctaatttgtactattcactaacaatatagattatagatttccttatttttcctggaactttgctctttatcttgtcagtatttgatttggactttaaaattagtggttttgtacacttttgacagttattacaaagtactatatattccacataaactgcctgatgttctttgagagtacatactgaaaagtttttttcagccaacagaagaaatggaagacgaggacctaatttgacaatatctataaaaattacaaatgcaatctatttctcagaattcatttctgaagtattctttcatatgtgtggcatgacctgtgtgcacatttattaaatacaacatttttgaaatcgtaaagtgttggaaagagaccaaacaagtatatattaatagaagatagactaagggatggtacatctatatagtggaatatgcagatgttaaaaaagtagagggtgcttgctatgtatggatatgggggacagcaaggtgcagaatatgcttatctgagcttttgagtaagaaggagtggtatacaatggtattcttatttgcttttttttttttgcctgaagaaaccctataaagatatttaagaaactattacatgtgcttgcttgtaaatattacttggagaagccaggtgtggtgactcacacctgtaatttcagcacttttgagaggccaaggtgggtggatcatttgaggtcaagagttcgagaccagcctggccaatatggtaaaaccccatctctactaaaaatacaaaaattagctgggtctggtggtgcatgcctgtagtcccagctactgggaggctgaggcaggagaatagcttaaagacaagagacggaggttacagtgagctgagattgtgccaccgacctctagcctgggcaacagaggagactccatctcaaaaaaaaaaattacttggagaaagtagggcagctaggaggggcagaggtggataagaaatatttttcactgtatactttttattactgtattagttggttttcacactgctgataaagacatgcttgaaactaggaacaaagagaggtttaattggacttacggttccacttggctggggaggccccagaatcatggtgggaggtaaaaggcacttctaacatggtggtggcaagagaaaaatgaggaagaagcaaaagtggaaacccctgataaacccatcagatctcatgagacttattcactatcatgagaatagcaaggggagagaccagctattcagttacctccccctgggtccctcccacaacacatgggaattctgagagataaattcaagttgagatttggatggggacacagccaaaccatatcaaatagtgttttggttttttagccatgccactgtattgtccattgaaaataaaactttttttaagtattggaaacttgcatgtatactaatattgatagtgggttttggaaatttactgagtgtctgtttttgagcagaaaacgttatgtttggacacatggatcagggtcctccttttgagacttttggttgctggtgattttttctccagtggcaagtacttgagcatttcttctgcaacagaaaccctaccatttaggaggcttaatggatgctcttttggttgcattagatggatgaagaaacaaagatgaactaaatatccaacttctactttctaggagttgccattacttctgtgtaaaatagggatagaaagtttttgttttattttgtttacttctgtgtaaaatagggatagaatgtttttgttttattttgtttgcagaaatgcgaatggtgtaaagcttcttcaaatatggacacacacatacacacacacatataaaaagaaaggctgcctttattctgccattttatacaagaatctttctacacataaaactggacagcaaaattgctacctgaaaatttgtaattcttttcctagatgatatttttcaagaaccaaagttgctaagaactccagttctctgctggatgaatcaagcgagcagtgaacgaaatgcctggcaaggcttttgatgggagaggagtctcattttgctttcaggatagacactgaacatcagtacatttgtaatcgtggtaaccacccctgtcttggttagagctttcatggtaataatttaatttctattgataaaagaatttattactgaatgtatagtggagaagaggaagcttattaatgatctgaatttatgtgaagtgtacgctatattttattttcctactttcttccatgcctaataatatttttcaagatttttagtggcagtgcttctctcgtttttctagttggaaactttcatattattcagaaagaaaaaatcctggtaaggaaattggagaccaattttctgtattagtctgttcttatactgctataaagaagtacctgagactggtaatttatgaagaaaagaggcttaattgactcacagttccacaggctgtccaggaagcttgtcttggggggccttaggaaacttaaaaccatggcagaaggtgaaccggaagcaagcacatcttcacaatggcggagcaggagagagagaaagagagagcaaatcttggaatatactaagagtctggtgttgattgcctattttttaatgctaataagtaagtgttctttttctctgggggatttcttaactgttctattgtaaaagcaactactataattgccttttataatacccagatcgctggatttgctatatactagacttgatgtacctgaagctgctaacaggattgcctgtcatttagctttcagaattcaatttataaaatgtcattatttttccccttccactgcaatactagagctgaagacagacagggaaaagcaagcaaatatttgagagtgtgaatggtataagttgagggtatgaatgttggaaatgaacatattcacctctaaataaagtgagagaaaccgctattctttctaaattttccatgtgccagtaaaatgggaatggtgatttccttaaggtattgctctggagaatttaaataattgagttaaatgtcaaacttcacatttagagagcctactaaaaccttcacaagtgggggcttacagactagagttttatttttatttttattttttctgtagggaatggagtaggggaggcagtggcacacttaggtgataccttgcacagcagtcacaatgttgaaatttgaagaaatctagtgaaaattataaaattttcactagacatgaataaatcattatgaaagaatataaaaatagccagagatcactagaggggaaagaggcactgcaaaagttactggagggaatacaagagaagaaaataattagaaaacagtcagtaagaaatgtcatcccattctgtcccctggctgctttttgtggctttgttcagtgggtgaaaattctggagtgtttattggtgtcttgtagcataagatgaaatatcttatcaagatattttcattttctcaaagtgaaatgcgatccctttaacttcttaggatgacaggtacatgtggaagcatcagagaggaacttgggatcccacgagctagcctctgcttcatacacagtggagtagatgcctgaggttgtcagcaaatattgaagatttttatttccagggggttagaaacttcacgtagcttctctgctctgcacacataaggagtaagtggattattttccctgagtcagtaaggttttcggtgtcacataatctcaggggaacaaatgcaattgcttagatctcaatatactcctcagatggcaactttgaggaggtaaccaggaggtatctgcactccctctgtgctcgcctggggccttctgactttctctgtaaaaagccctttctgtattgatgctcccgggtggtagtgggttggatggccattacataatcacaacctctttttttcagtcagggtagctattatgcagagagctaggagtggattacttcttggcaggaataagcacagaaaaatctatccagatttttttaaaaatggaaacattgtgaaaaaaatcttgatgtctctgaaattggaggatggtattttatctgaggaacatgggtagggaatgttggggtcatttcttagctctgaccttagtaagtcatagaggcctttttatactgatgttgcatttttaaaaggcatcttgacatgatgggagaaaaacagcagaccaaaagaaggcagacctgatagttctagttcaggctgtgttgttgtctgagttgtcctgcaagctgatacaaatcacaacttccccgagcctctcttttctcatcccttcagtgaaggccctctgtaatacccaagtcctttccagttctgaagtctgttcaaagtgggggcagctggaggactcagggaggtccacactaaagaggactttttttttccttttttaaagagaacatttttaaaatctagctttataactcaaggatattttaaatacagataactattacatttgtattttgtaatgaatatttcagatttatgtttgtgccttgaagctaattgactgtgaagaaaacggttttataaacaaagccaaagagaaagtattcctggatgtattacagcagacaaataatcactttactactatggtatattagtccattctcacactgctatgaagaaatacctgagatggagtaatttatgaacagaagaggtttaattgactcacagttccacatggctggggaggtctcaggaaacttacaggcctggcaaaaggtgaaggggaagaaaggcaccttcttcacagggcggtaggaaggagaagtgccgagcaaagggggaaaagccccttaaaaaaccatcagatctcatgaaaactcactcactataatgaaaacagcatgggggaactgcccacatgattccattacctcctactgggtccctcccgtgacacatggggattatgggaactacaattgaagatgagatttgggtggggacacagccaaaccatatcacatagctttggattatcccttccttttttcgatttttcatagcccattttttgtggatgctaaaaccaaaattgctctccacatgcatagcatatccataaccctcttaccttccatcactttctgggacttgttcttattttagagtgacttttaaagactgaacatgcagaagcctcattgcctcttagaaataaaggatgcccttctgggaggatgtactaagtccagtgttggaaccttgatactgtcctgggctgacatttcctctttaagaatcagctccctcacaccacagggtattagagaggccacatgggctgtgaaaaccgggcactcagggctggatagattgattgctaacaaacatatagtctgctttcttcagaattagtagctggctttgcaccttcaacttgagcatgagctcaaatgcatttcttttttttttttttaaggcggagtctcactttttcacccaggctggagtgcagtgacatgatctcggctcactgcaaactccgcctcccgggttcaagggattcttctgcctcagccacctgagtagttgggattacaggtgcacgccaccatgcctggctaatttttgtatttttagtagagacagggtttcaccatgctggtcaggctgatctccaactcctgacctcgtgatccgcccaccttggcctcccaaagtgctggtattacaggtgtgagccaccgtgcctggcctcaaatgcatttctatacaggtccagtcagagtagtggccagtcccactcatgtgttcaaaatataacctgaggaatgcaaagcaacatgtttagtcttttgtcttaataattcctctattagcaacttcattagacatccactagtacataactttgtcactgaaaccatatcattgccccccgaatagccttctagactcctaaccttggaatgcaccaaggaatatttaaactgtctcatagttttgcagaagcagaaaatgctaggattgtaaccctgatgatcagttctccctgatgacttggcctgtgttgcgcctactaaattcttcttgtcttctcctttgctctattgtcatgatattggttgaagggaattagtaaatcagactggcattgaatctctgggagctagaaaatgggctaagatttagatggcatattcactttctgcgttccgtttgtctgtgtgcttgttcttattcattcctaattttttcctgtagctagtcttttaggattttggtgtcaaccttacatataattgcctgggtacttcctgaggtgatcctgctgattttagaagaagtgaaagggaatattacatatggtagtagaaggagtcctggataggaagactttgcagtcctggcttcaagtccagatgcaggcagtcacttgtcactttggtcaacatcttaaggcctccaggcttcagttaccttgtctaaaacaaggcaccttctgcctctgaatttctgactcataaaatggtccaagccatattgtcagtgattagtgcttttaatatcagcttcatacagaggtagctttccaggctgctctaacttttggattacataacagagatagagtgcctgatggatggatatctcggtatctggcatgttatggtgagtgggagacagccagaagaaaatccttggaaagtatttttttaaatctgtgtgaatatgtttatattgggatggttctgaattctaggttttagataaactaagaaaattggatgtaatatgaagagataaaattccatgagctgaagttgatgagtaatatacaactaagagaggagaaaaggaaataagagattaaatgagatagagaaaaataatgctgggcaggccatttaataaattctctgactttgtttctgcttatgcagaagaggtggactaaattatacctgaactcctctgttctgtgaaggtcacaagtacagatgtttctaaccttgaagggaagtaaggtgtttattcatttttttcttttagcttttgttctttccctaaagatagagaatatgcaaattattaaaaaatcaaatacaggccaggcgcgatggctcatgcctgtaatcccagctctttgggaggccaaggcgggtggctcatgaagtcaggagactgagaccatcctggccaacatggtgaaaccccgtctctactaaaatacaaaaaactagccaggcatggtggtgcgtgcctgcagtctcagctacttgggaggctgaggcaggggaatcgcttgaacctcagaggcagaggttgcagtgagccgagatcatgccactgcgctccagctaggtgacagagtgagactctgtctcaaaaaaaaaaaaaaaaaaaaaaatcaaatacagaaagacatgggggaggaaaagccaaaattcggtgaaatattcctctctgtataaaaccatgattgagtcactgtcagtcatttggtaaagatactattagacttctgtgcaagcagcatgaactgttgcatagcattcaaggtgaaggaaacaagcagtcacagcttatatttttccaaactaaattaaatccaactgaaatgtatacttgccagactgacaggaatttcaatatcaccctccagggatattctctcctgtgcctagtttgtcagccccctaaccccaatccccacacgtgtgtacagtctagaaaggaatttcgctgaaatctgctttcaagcagagaagagccttaccatccaccaatctcctgctgccatccctggcctgccctcagccttactaccatgtggcaccactattgagcactagcccctcttggctgtccagtagtgcttgcttttgatactgtgaaatatcatgagcttgagctcccagcaaagaccacgtgcctctttgaacaagggcagctctattagttcagtgcatcatccattttctgtgttacataatatatcattgatggcatgtgccatcatttattcagccagtcatctcatggtgaatgcatagatcagcattatttataaagtgtcacgttgaacactttacatgtatctttggccacctatctgtgtttttagagctaacactcaggagttatgttgctgtatcaaaaggtttacctgttaagttttgacccctattgcaagtttgcattctggaatagatgcaccagtttacattcctgagagtgcattggagtgcacttccttgtcacgcttgctgatgatctctgtgcaagaagaaaatagttctggctaccacaatctcagaagaagaacatatggtcatacacatggcaacattatctctagagaacttgggttcctctggtattcaggatccatctgctagggatttattatttttcttgtttcccctctctaagttggtgttgaattggtcatgttgacccacttaaattcagaggatgagctattttatttatctcatgttctcttaccatatttgaaggaatggccagatttttctcagccttccaaccctttcactgtgttttgtcgtgtatgtaggatttacccagtagcaaaactgtaaattcagggtcttcaagctaaaacttcctaaagcaataccctaagactcagttgtgaactgaaaaatctgtgggactctagaggagcggaagatctgccccttggcctcttggttccctggattcctgtggttaggttagctggaactaattgctgaatatttgtttctttctgaagttaaccagttattttcttatcttttgttctttagccagattcatttgtctttctgactttttcatgatttttctgtattttacccttattctttagaaatgtttctctattctgtgcttgtgattgatttctaacgtctcctagaagttacaaagggcctgggttaaaatcctgtcagcaataacgccatatggtttcctagatgctctgcacactaaagaaaacacttattctgatattttaatcaaactctgaggacttaaacatatggtataaagaatgctagttaatagctttttgtgttattttaatggcaaaaactgcaattatgtttgcaccaacctaaatagaaccatatcagagtagcagaagaactcatctcaaagcctgtcttagagaggtggatggacctgtgcactgtgtttcatcatgctaatatggaatgtgcctgcctttgggcaactcatttcatagtgggccttaatcccaattggtaaaatgaactataacctttcatcattccatagattcagcttaaagtgggcccacagaagaagagagggtagagagtgaaaatggagtcacaaacccagcagagaatcctccctctggtttctgaataaacattgtatacacagaagaaatcagtacgcagaaccttcccagaggaatcagactgactacaaaagttgaaaatctcttgctacaaaatacttagaaatgatggataaaacaaaacaaaaatgttttcattcatagcaaaagtaaccagaaagtgttatcaggagcctaaaatgaagagggaaaccgaagacctgagctgcttcaggaggagtagtgaggggagaggtggtagcaggtagtgggtgagggtaggacttgagtatatcgtgtatcatttggggcctctttgtggggagagattggaagtgagtcacaagcatgagtatagaaattggggaacaggtagtaaaataattaccgtcattcgatgatatgattgtatacctagaaaactttatgggagcaattgaaacaacatgacgaacaataagcatgttcattttaacatacagaaatattagcatatgggaatagcctacatagatgcgaacagccaccaattagaagatatcgtggaaggaaagatctcatttgcagtagcattaaacaaagataaaattcctagctataaatgatataatttttctatttaaaaaataaatataacacatgtatgatttttcctagaaaaagacatgagaaacagaaaagcataccatgttctttttatgattgaaaagacttagcatcataaaggagtcagctttctctaagttaaactgtaaatgtaatgtgatacttatacaaaagataatatttttagtaagataagcctattataaatttatggaaaaatagtaaagtatagcccaggaaaatataaggaaggataataaggaaaactagccctaatatatatttaaaaacattaaaaaatctttgatatttaacatagtgtattactagttcatgaagaaacagattaatagtttaacataagatacaagtgtatttcaaatcactaaaacaaaatagataataaatggttttgggaaagatggatagtctgcttggaaaaaaggttggatccataattcacatcttggatccataattcacattggcaggaccaggaaaattttccagtggaataaataaagatttaaatgttaatgaatgaaatcataaaaatcacttgaagaaaccagtgaagaaatttgaaagtagttttgatctgatggaagcttttctaattatgatcccaaacccagaaactataaaggaaagaatcaggatatatgtaccgatataaagaggagaaatgttgcacagcaaaaaaaaacacccatgagctgggtcacgaaaaaatttaaacagatggaaaagcaaggagcaaaacatagtgaaccctcttgtttccatctcccaatttcaaccatttcaaactcatgactgaatttctttattttgaaggtaatccttgcttatcatatcattgcatctaaaacaacctgcatgtgaatataaaagagtccttttttccctcaacacattaaaatgccattattacaattaggaaattagtgattccctaatattcatgatgatttttaaggcataggaaaaatgagtcttccagtaagtaaataatgtccaccgaaatatctaaaaggcacaatctgtgatttcagaaatggtttttttaaagagattaatatactgcagaaatttctattaaactaaatttagacatgcttccccctttcagtgttccaaatgccctgaatctgttaatgccttgctgtcagctggttatgccacttgattatgcttttgttaatcctggatcttgctctgacctgaaagaagcccattactttatcctgccttaaaaatcgcttaggactgcgacagatgatggcccagcagtctctaataaatccctcaagatggggacacatcagacattgtcaggaccctcaagctcttgaaggaggattcaacagagatgaaatgtggaggtagtagtagcctgggtgttgccagaatttcccaccctttatcaaatgaaaatgagctgcattatttgggtagggaatgattttaaggattgtatggctcggggaaaaaaaacaataaaaatattttataaataactagcttgagtgaatctcttttcataaaaatatttaagatgcatgtgatgtcaataatgagtgatgttgaattttgatgtaataatcacaagtttgaatattaaaattagtgtgtttagaataacatggcagtttcatttccaaaagttgaggaggagggactcctccttaactcattctgtgaggtcagcatcatcctgataccaaaacctggcagagtcacaatgaaaaaagaaaaacatcagtccagtatccttgatgatgaacatagatgcaaaaatcctcaggaaaatactagcaaaccaaatccagtagcacatcaaaaagctaatccactatgatcaagtagtcgttatccctgggatgcaaggttggttcaacatatgcaaatcaatatatgtgattcgtcacatacacagaactaaagacaaaaaccacatgatcatctcaatagacgcagaaaaggcttttaatacaattcagcatccgttcatgttaaaaacccttgacaaactagacatcaaaggaatatacctcaaaataataagagccatttatgacaagcccacagccagcatcatactgaatgatgaaagcattcccctggaaaactggaagaagacaaggatgccctctttcaccactcctattctacatagtattggaagtcctagccagagcagtcagcaagaggtataaaaagcattcagataggcagagaggaagtcaaactatctgtctttgtagaccatatggttctatacctagaaaatcccatagtctctgccagaaagctccttgatctgataaataacttcagtgaaatttcaggatacaaaattaatgtacaaaaatcagtggcatttctgtacaccaacatcatccaagctgagagccaaaccaagaacacactcccattcacaatagccacaaaaagaataaaacaactaggaaaacagctaaccagggaggtgaaagatatctacaatgagaattacaaaacactgctcaaagaaatcggagataactcaaagaaatggaaaatattttatgctcacagataggaagaatcaatattgttaaaacagttatactctccaaagcaatttacagatttaatgccattcctatcaaattaccaatgacattcttcacagaattagaaaaaaaaaatattagaactcctatggaatcaaaaagcctgaatagacaaggctaagctaaaaagacaaagctggaggcatcgcattacctgacttcaaattatgctacaggctatggtaaccaaaacagtatggtactggtagaaaacagacacacataccaatggaacagaataaagagcctagaaataaagccacacacttaacaaccatctgatttttgataaagttgacaaaaagaagcaatgggggaaagtactccttattcagtaaatgttgctgggataactggctagccaatatgcagaagattgaaactataccccttccttacatcatctaaaaaattaacaccagatggattaaagacttaaatgtaaaacctaaaactgtaaaaatcctggaaggataacctaggacatgctgctgtggacataggacttggcaaagatttcatgacgaaaatgccaaaagtaattgcaacaaaaacaaaaattgacaaaatagagatcttctgcacagcaaacagacaatctacagaatgggagaaaatatttgcaaactatgcatgcaacaaaggtctaatatccagaatttataaggaacttaaatttacaaacaaaaaaaaaccccattaaaaaatgcacaaaagacataagcagacacttttcaaaagaaagcatacatgtggccaacaagcatataaaaacatgctcaacatcactgatcattagaaaaatgcagatcaaaatgacaatgagatactatctcacaccagtcagaatgactgttatcaaaaagtcagacaataacagatgttggcaagattgcagagaaaagagaatgcttatacactgctgctggaaatgtaaattagtttagccattgtggaaagcagtgtggcaatttcttaaagaacttcaaacggaattaccactcaacccagcaatcccatattgggtatattcctaaaggaatataaatcattctaccataaaggcacatgtatgcatatgttcagcacagcagtattcacagtagtaaagacatagaatcaacctaaatggacttgatatagaaaatatgtatcatatgtaccatattcaggccacttaaattgacgtagattcaacctaagtcgactggataaagaaaatgtggtttatatacaccacggagtactacgcagctgtgaaaaagaatgaaatcatgtcctttgcagcaacatgcatggagctggaggccgttattctgagtgaactaacacaggaacagaaaacaaaatacagtatgttcaggtataagtgggagctaaacattcagtacacatggacacaaagaagggaaccatagacattgggacctactcgagggtagagagtgggaggagggtgagggtcgtaaaactacctgttacgtactgtgcctatcacctgggtaacaaaatacaccaaatgctcatgacatgcaatttacccatgtaacaaacctgcatgtgtaccccatagtgctaaaataaaaatgaagaacttggtagttccatccaatttgttttaaaaaatgtttaataaaaaaaattttggagacatagggctaaaaactgatcaaagtaatatatagaaagtattagtcgatgatatcaaagtaatgtcgatatatctaatgtaagagatcaaagtaatatattctaaataaaacttagatttgagtcatttgagagtttaccccttttattctggagtggcaaagggacatgcccaaggccactaagtagggcctgaatcccatgtcatgatcccagtgcctttttcctttccatgtgatcatacttcttcctttcatacctttaagtcaattatcttccttccttagaatgtgtgttgaagttttgaataaagcataatagacatgaatgtatttttatgctttcctaatttaagctgtttttctccacattgcctgtgatgctagcacctcttcatgaactttcctgtcctctcagttgtaccaggcttttgattctgccagatgcagcgggagagcaattgctcttcctaaagaaatccatagctggctttattttcctcttatcttttcttgccatggtaaacttttatggtcatttatctctgtcataaaaatgaatgttgtacgtgtaatctttcctgtcttaaattatatgacatatactgttcatgtctttgttctagtttcttttatgtaaatgggcattttggtttatgaagaaagatttgtatcttatttttttcctcctggctttagacatcttataggtgagtcccttagagttttggatcttccttgcaggtccctctattcctgatatctaagactaatcttataccattaaaatgaataatgacccttaaaaaatggaatcctcttctcacgtaggagagtcaggagaggctagaaaaagttgctgtagggttttacctcaacaaaatagtaagcatttgaaaggcaattcaagcagtgtgctttggccagagaaatgtagcatttcagagtaaaagggatttttaggcaatttgtatatatatatgcacttgacatataaagcccttacactgctaaccagtggtcagccaatccttgcttaacccatgctgaagaccagaaaatcaggagagcagcctacagtaatggggggaacttgtgcttttaatcaggcaaatttctgtatcctgactgcaacacacacatgttgtgaccttgggcaagacccttgactctctgattctccatttccttgttgtggtctcattagagaattaaatgacatatcaactaccactattctcatctatcacatctgagctgaaatatcttccactggctctcatgtctttcttctaaatcttcctcttggggtcatacagaacacggttgtaatctcactagctatcttctaggtgtgtttaatttcaagtctcaactctctctagggctgtccattatcttttatgtgtttgaaagctgtgcaatcaaaggacaatggagacagaacattggtaagccaatgtcaccttctagcattctctgtgatctacctgtattttactgtgctgtactaactttgtgctatgcaactgtgctgtactaactttgtgctatgcaacagtcactttgtgaacttgtggtatttgtgaacaggagctcaaattaaatattccatttcagtcattaactgatgtgaaaaactcttccttttctggatgaaactatagatatgtttgggcaaaggagagtgaaagttgatattgataccagacactttacagctattagaccttacacctaaatccttatgtctaagatttaaagcacggtcccttacataagcctgtttcatttgctaccgataataaaaatcctgtcctaacacagacaagtgaaaaagtaacctcacatgcatattctgtttcacactcatcttgtgtatttactcttcacgtgtctcccaaatccaaataaaaggtgagacctagagagacacatgttcacacttgtcctcttagaagcatgtagattttatgcatgatgtccccattattgtaaatggagtgcacaaagataattcagcaagtccttatctctcagtgtctcaattatgaatagtttttgattcagtgttgccctgagggcctctgaggtgggtagagaaaccgtctgtctccagattctggactgttcccaaggtcttggcttctttcttcccatcgtggtcattgctgttcccaggttctgtgcctgcttctggacatcctcatcactgtccccactcctttcatttttcccttcatttttctacagtctcactcgtatttgtgtttggttttgatagtgagactgaattttgtttctgcttaaatgattatcacgctttatatatttcattttttgattttgactcttagcattctttcatgtcagatgtttctagagaaactctactttgcgtaatttagggaccccagagtagagcaattccagtttgaaaatattctaattttggcttttaaaaacatgtgaagtgtgaggatgaaaccattagagcttgactttcttagaaatttgtcaagtatatatttaacaaatatatacgattgcgttatactttatttataaactaaatgttctttaaccatgaacacctggtcaggtgtctctagtggctttaagtaaagaccacttcatttaccctcatgtggctaagataatgcctcttgttgtgcttcaggtttgttatgtgaaagcagtccacttctgagattagtttaaaatgttctatttaaaggctgtttgcatggccccatttaagaaattaggctatgcaaatccaacctgattacgagattcagttttaaagaaatttgaagtgcatttgagactctttgttaccatcgatcttagattttactggaatgaaaccactgagcttcaggcttgttaggtttcacttaagaattccatttccagcatcaatgttattacctttcattctgagtcctaagtgaccaagctattatttttctccctgttcagcaattgattttgttgccttgatatacttttatttgtcagtttatttcctgctgccatgattcttactcctatcaagacattagtttttgtttctaatgtgggtaaaatgtttaggccagaggttctgctgatctatgattctctagattctgcaggttgaagtgtttcccagggcttgcttatttggggaccatgaagaatccatttggcctgaaaaaagcttggtttatttgtatactacttgtaagataagtcagtcctttacaatatcctgtcgtggatggaatagaccactcatgaatagaaaacagagtgtattaaagcctttaatcaagaaatcctaccaaattcctaatcgcagatgtaagagcatatttcttgtgtagcaagtccatgaaaccaaagggctgatccatacataaatgtgtgatacccctcagcagagagagatgctccagatattaggctgtttttggtgctgtctctaacatgcaagtgggctgtgtatcattggtctcttttcctccgatgtgcctagtagagcatcctaaaggagcttacaactgaagatgaaaactagcatgtgaataattacatgttacatataaagaaaacgtttctcattatattaacataaatattatatatgtgtgtgtatatatagtttaacttatttgtattacacacacacacacacacacacacacacacacacgtttaacctgtattctgtctcccctgttactttgcttattttagaatatggcaatattttaatattttggacagccaaactgacatttattcaatatattgagttcctagtatgttccaggcactgtggaagggtgctgaagacacaaagaggagtaaaaatatgcatccttttcttaaatagttggaagcctagtgagggagatagaaatatataccattaacaatagagtgagggcagtacccctagaggccctataagtacaaagtgctttgaatccttagaggaaggagtggtccttatgattggagtggaattgtctgggaaggacttgctatgttgaagagtctgagtttcaccctaaaatcagttagggaactgatatggtttggctgtgtccccacccaaatctcatcttgaattgtagttaccattcaattgtgagtgagttctcacaagatctcatggtttaaaaagaggctttcctcccttttgctctgcatttcttcttgctgctgccatgtgaagaaggatgtgtttgcatccctttctgtcatgactgtaagtttcctgaggcctccccagccctgcagaactgagtcaattaaacctctttcctttataaattatccagtcttgggtatgtccttataacagcatgagaacggactaatacagggaccattaaggaattctaagccttggagtgttatggtcaggtattccttctagaaagttgatactgtggactgcaatttaggaatgagaagctagaggaatttttcaacaaattaaaacaatgaattactatatgatgcaggaattctacttctagatgtagactcaaaagaactgaaagcagagacttgagcagatatttgtacatccatgttcacagcaacattattcatgatagtcaaaaggtggaaaaacccaaatgtggataaacaaaatgtggtatatatatgtgcaatggcatatcgttaaaaccttaacaagggataaaattttgacatatcctacaatagggataaaccttatagacattataccaagtgaaataagccaatcctcatctttgaagtgtgataataatagtacagctctctcctcttatctgcaaggggtatgttccaaaatccccaatgtatgcctgaaactgggtattactgaatgctgtatataaattagatacagtaggagattcacaacaataactaaagtagaacaattataacagtatacttaataaaagatatatgattgtgcacattcattctctgtctctcgctctctcagaatgactgtgggtaactgaaaccatggaaagtgagatcacagataatggggaaaaaattgtgtctatttaataaaatgacagggtggtggccctgaggaataaattggctaactcatgtaaggtgcttcaaaggatgcctgacacagtaactcctcagtaaatgtgagctgctactgaagtacttttgttaccactactaccattagtgtttttttatttgaagaactaacttaaatatatgacatattaatcttgtttccttgactttgatgggatgtcttatttttaatagctttattgtggcattcttcactacagtaactgtacttatttaaagcatatagcatgataagttttgacatatatatacatctgtgaattgatcactgaaatccagaaagcgaacagaatccattactttctcaacagaacccaatgctttctcaaatcccttggtaattcctccatttccccagacgaccaatgttattctttctcttaccatagattagtttgagttttctagagttttggatacctgtaatcatataatattgtattcctttttgtctgacttctttcaatcggcataattgttttgagactccatgtttttgtgtatataaagttaattcctttatattgccaaatagtattccattgcatgaatataccacagtttgtttatccataagcacctgttgatggatgttgggttgttttcagctttggagaattataaataaacctgctatgaatattcttgtacaagacatattcttttaatggatgtatgttttctttagggtaaatctaagaatggaatagctggattatgtggtagatgtatgtttaacttttaaaaacagtactcaacagttctacaaagtggttgttctattttacaagccagcaacagtgtactagagtttctgttgctctacaccctcactaatacttggcatggcagactttttagttttttccactctgataggtgtgcagtggtatgtagttgtagtttttaattggcatttccttaatgaccaatgatgttgagcgtctttttatgtgctttttttgctattcctattttctttgatgatgtatctgttcaaatctgttcctcatttctctattgggtgattttcttattgtttctttagatttgagaattatttacatactgtggatacaaattctttatcatagatatgcttgtaaatattttctccacatctatggcttgactattttcctaacagtgtcttctggggagcagaatattttaattttgataaaaatctagttcatctaatttttcacttgtgatttataatcttggagacatctctaaaaaaaactttgccgaacccaagtttacaaagattttttcctatcttttctttcagaagtttcatagttaggtattataggtagacctgtgatcagtttgtgctaattttgtatattactgaaggtgtggattgaatgttttttgtttctgcatatgaacatccaatttctctagcatcatttgttgaaaactctggtctttcttcactgtattgcctttctatctctgcaaacaattatttgtcctacatatctaagtttgtttctagattatttattctgtagcagtgatctatttgtcttttctgatgccaatacctccttgattacagtagctttatgataagtcttgaaatcacattcatctaagttgttttgtccatctatgtccttcacagtgttttcaaatggatttagaatcagttaatcaatctgttggtctatctgtatatccatccatccatccaaccacccacccacccacccacccactcactcatccatctcactagctataaccttgattacaatgtccaatagaaatagtaagcgtgaacatccttgtgaacattcttgccgtgttcctgatcatagagaaaaagcattcagtctttcaccattaaggatgatgttagctatacatttttcttataggccctttttaaagtttaagggcattcctttcccttcttagtgtgctgggtttttttttttaaatcaaaagtagatgttagattttgtcacatgctgttgagatgatggtgtagttttcctttttagttttttaaatgtgttgattgatgttttgagtgttaagctaactctatattcctcggataaactccacttatccctctaaaatttgtagaatctgtagtgatatcctctatcatttgtaatattgataatttatgtattcttttcctgtgataagttttcctagagatttatcaattttattgatcttctcaaataacatgcttttggcatcattgacttttctgtactgtttttctattttttatttcactgattttttggctttgagctttattatttcctttcttctgcttgctttggtttaatttgcttttccttttcagtttgttaaggtcattcgttttgagacttttattcttttctaacacagatgttaggtggtataaatttcttcttgagtactgtggtagtgtcattccacaaattccatgttgtattttcattcagctcaaaatgcattctaattttcttttgatttctttattaaccagtggattatttagaagtgcattattaactttataaatatttggagattttccagagatctgcttttttatttctgatgtaattccattgtggttagagaaaatacgttatagaacttgaatccttttaaatgtattgagaattattttatggtcaagaatattgcctgtcttgtatacgtttcatgtacacttcagaataatttatattttgtcatcgttggatggagtcttttataaatgttaataaagtcagtgtggttgataggatagttctagtctactatgtatctgacaattttctgtccatttgttttaattattgagaaaagggtactgaaatcctcaactttaatttaggattttgtctgttttacttgtatttctgtgtttttgcttcatgtattggaagaaataatattgggacataaatactaaggattgttatatcatcttgattaattgagccctttattagtatgaaatgatggttttgatccctagaaatagtccttactatggtgtattttttacttgtgttgacttgtgttactgtgtgtgtctttttccattctattaccttttttcctaacctattagtatctttgtgtttaaagtgtttgtaggtttgtagtaagcaaatatcgttgggtcttcatcttttatccaatctgaaaatctctgccttttttatggatgtttagaatatttacattttaatatgattattcatatctttaggtttaaaccagtcatcttgttatttgctttctatttgtttaatctgttatttattcatttcctttgtttttccctgcctttttttggattgagtattttaatgattctgatttatcttccttgatcttatattgttcatagctatttgtcctgctactttagtggttggtagtgcctagatggtctataacattgatctttaacatcacagtttaagtgatatttagtacttcacttattgcatacaaaccttagagcagtatacttcatttctgtctctcttggcctttatgttactgttgtcgtatatatattttacttttagctatattataaatccctgagtacatagttgttgtttttgtttgaatagtcagttatcttttaataggttttaacaacaaaaaaactcacatatataacctgtaacattttctatgcttttaatttctcatgtagatccagattttcatctggtatcatttgttttttgcttgaaggactttctttaatatttctttctcagtggttgttgagtgatgaattattccagcttttatatgtctgaaagtaagtctttatgttgcctgtgtttttggaaggtgttttcacaggatatagaattcttggtagacatgttttgttcttttagtgctttaaagatgttatcaacagtctttttgttttgtattgcatatgcagtattcatagctctcatcctttgtatataatatgtctttttttctctagctggtatttaagatttttttccttatcactggttttgagtgtttgattatgatttctttcttttcttttttttttttttagatgggttctcactttgttgctcaggctggtcacaaaattgctttgttgtccaggctggttatgaatatgatttcctttgatgtaatttgcctagtgtttcttgtgtttaggattcattgagcttcttggattcatcagtttgttgttttactgaagtttggacattttcagccattactttttcaaaattttttttgtctctctccaattcttctctccctcatgaacttcacttactcttctgttaactcactcgatattgtcctatatctcactgattattttctttctttttttgattcattttctccatgtgtttcatttttggattgattttattgctaggctttaaatttcactaatcatttttcctgcaagacctcccgtggttaataccatccagcatattatttatctcagacattgtatttttttatgtctgggaattatacctcatagttatgtgtatatataagcagctgttcctcaactcataatgggcatcgcattatgtccagataaacctatcataagttgaaaatatcgtaaattgataatgcatttcatacacctaatataccaaacattatagcttagcctagcctaccttaaacatgctcagaacccttacattagcctgtagatgagcaagttcatctaacacaaagcctattttgtaagaaagtggtgaatatctcatgcagtttattgaatactgtactgaaagtgaaaagaagattggttgtgtgggtgttcaaagtattatttgtactgaatgtgtatcacctttgcactgttgtaaatttgaaaaatcttaagttgaactatcataaattgaggactgtctatgtttgtacgtgtgtatgtatatattctacatctctatttaactttttgaacaaatggaaagtaattataattattttaatatccttgtcaaacaattgtatcatctgtggcattctgagttggacttaattggttgctttttgtcatttggatcttttattttttgcttctttgcaatgcctaataatctttagttgtacgatattgtgaattttacttgacttagggggctggatgttttaatttttctataacagttcttggtctttgttctgggacacagcgaaattacatggaaacagttttattcttttgggtcttgcttttaatatttgctaggagggaccagagcatcatttggtttatagctaaagcgccttgctttgcgctactgagatgagacctctgaattctctactcaattccaggtcaattataaggttttccagtatgtgcagtgggaataggcactcttcctggccccatggcagtgtgctgagtactgttccctctactgtttttggatggttcttttctcagtcttggttagtttcctcacatgcatgtgttgatcagaactctactgaataagggaaacattttatagatatcttgggttctctctcagtgcagctctattcactctggtatgctgtcctgaaaatgctagtcaccttggtggtctcagattctgatctctcttcactccattcgcctatgttctctctctttgcattgtgacctggaaaatctctcaaagcagtaaactgggagagttgtagggctcacctcatttgtttcctctcagtcagggatctctgtctttcatttcttgacactcattcttaaaaatggttgtttcttatatagatagattcatacatacatatggttgattggttggttggtttcaggcaggaggttaaacctagtccctctcactccattttgcccagaactgatggcctgctttttatttcgtcagaacctggtagctatctatatctttaaaggcgttcattatggtccagtgggaacagcaatataaagctgaaggtctcatcctatttctaccaattaccagctgtctcaagggacagacttgtggagtctcctattcggaaggtcatgtggctgatcatccagtgccgcataaatcgctttctgtacattctctcttttatgctgtcacatgttgggcagctctcccttttgaagaacacatttcgtattttgggtatttctcatcattcgaaacatctttttcatattacctgaaatcggtcttttactaacctccatccaaatttgtctagcaaagtcatatgaaattaatcttttttcccacacagtagccccactcttatttgagggcttttgccctcttccttcccaagtcatctcccagagtaaaaaccttttgatctctgtgagcttcagttgtctcatctataaaatgtgctatttattttaaaaaggattcctgtatctgtgagtgcctcctttactgagtcagataccatgccagatgctcaggatgcagaagagaatatgccctctctgccttccagggactcagacaaagcgggggaagagaagttaaatgatacagcgcacagataaaattgctaacagaagtatgccaggcatgctgggcaagtcataggattttatagatgaaattaatggaagtatgtgaaatgtactctatgtgctgtaaaggactgtatgtttgattatgtttgatattatttagtagtagtcaaagatgtactagcagctgctccatacccattatttttttctggagtctgttatgctttgaccttttcggtgttaaggttctgtgtgaatcctctgggttccacataattaataagttttagtgtgtgccaacagggggtggaaacatgacagtaagttcattttcttcctgctgttgcaggttatttgggcttggctcttgtaaaagacaacttgtacccagtgaattctcacatgaattcaaatcttgtaagctaggaatactgtaaatctctactgatgcttgactgagtaggactttacaactccagatggcagttgtaatactttagcatttaccatacagagaaatagaaaacaattttctgaagaaagcagtgacaaaattccaatatcatggttttgtagcactagttcatgccatcctccctcacacagtgttagaacttcttatcgtgatttatcaagcatttcattacattgccaacgatatgaaaaacaaaattaagaactgctgtatactggtgtggcatggtgctgaagtcaggctttgggaaagtacacaatgtggcagcatttcttaaaggcctggagaccgtgttaaaaatgcagattctggccaggtgcagtggctcactcctgtaattgccacactttgggacgccaaggcgggtggattgcttgagcccaggagtttgagatcagcctgggcaacatggtgaaatcccatctctaccaaaacaaccccacaaaaattagctgggcatggtggcacacacttgtagtcccactgactcagggggctgagatggaaggatcacctgagcctgggggagatcaaggctgaagttagttgtgatcatgccactgcactccagcctgggtgacagagtgagaccctgtctgaaaagaaaatgctaactcccaggccccacctccaaatattcttatttagcagttcaagaaagtgggggctgcattgtacttttaattagtttctggatgattctggttcaggtgggtcctgctttgaggaacactggtggagggagtgaccatgtgatataaggagaatcgattttccttcttcttctgcgtgtgaccttgtatttattctgccatccactataacttctgagggtttactttttatcaggaatttaaatcctaaggtgtcataaagatgagttaaaatggttctgttcttgaagtatcttcagtgtgacctgtctggtttagtcagggtagctgtctgatcttgaatgggttacttttaagctcactgcatataattggaataatatggtctacctaatcttcaggagggttgttgtgaaaaccaattgaatgtcaagtgccttgcagtagtcatagcaaatactacttagtcctctcttagcattaattgtgccaatattacttctttccaaagcggttcaggtatctaaataagattctgaactctaacacttcaaacattgtaaagtgatacatgtgagttaactatttatagactgtttctaggaactgccaggcctaattccagtcaatgttttcatgatctgccaaattcagagcagcttataaatatgaagaagggacagaatcttgtctagagtataaagttaagctattggagtcaggtacatcatgtccttctcagtacctttgaaagtttttggctgggcacaatggctcatgcctgtaatcccaacactttgggaggccaacgtgggaggatagcttgattgagcccagcagtttgatcccagcctgggcaacataacaagaccctgtctctaccaaaaaataaaaaaaatttatcttggcatggtggcatgcacctgtggtcctggctatttgggaggctgaggtgggaggatcccttgagcccagaagttagaagctgcagtgagctatgattgcatcactgtactctagtctgggtaacgaagtgagaccctgtcttgaaaaaaaaaaaaaaaagttgtaatgcccttgtgctactggtatttaaaatgtaatactgtgtgaagaatcatttccacacttgatttcatgtatcacctgtgtatatataataataaactataaattatatattatttttgataagtagaatttctttttatttctgtttactaattaaaaaaaacctcctctttatttttgatgtgttgaatatcctgtttataaagttgtagttgaccaaaacaaatacacaaaatcatcagtgacaaagtagtattaaattttatcaataggaagaaagatgtttactttattttgcttgattctcaaattttaattttagcaacatcccctctcccaaataaatttagtaccggagacacgatgcgtcaaagaagttgtcccaaaagagaattaactgcatcatcttatgcctctttacagacaggaggggacaaaagaagaaagttacttttctaacatgctttcgatacttagattgttaaaagaaaaaccttaggcaaattaaatttaacagagttcgactgagcaaagaatgattcgcaaatcaggcagcccccgaaccaaaatacgttgaaagagctttggcctgccttgtggttgaggaagatttatgaacagaaaagggaaagtgaagtacagaaaacagaaatgaggtaccgagacagctggattggttacaactcagcatctgccttatttggacatggtttgaacagttggcagcgcttattggctgaaccctggtgattggcccaagagttggttacagtctgtttgcacatctagttaggttacagttcactacctgctaagaaacctttaggctgaacctaaattatataaggaggcagttttaggctaagctcaatttaacaaggtgaaataagatataaggaaacgtaagaaaaatgaaggacttaccactcagttttctaaatttaacttttcagaaagcctaatggtcttggtattgaagatgcatacctatctaaactggtggttcttgacttatgagccatgatgtgcttttaggtgagccaccaaaatttgatgaatgtggacaattatcgtttgctgcagtggtcactacagtggctttccagaggaaacattttgattggattgagtggtagtgtgttgtggagcagggtacgacttgtggcacataagacatgggaagccttatagactggttaacaaaacgaggtcagtgtttcaggccacatctgctctgctttctgaactctcgcactctcctctggctagttcctgcctgcttggtcctgagtctctttgtggccctctagattggcagcttggctaaactgactgcttggcttttgattttgtttttggctcttagaagtggacccacccactccaatgtgattgagaaaattaacatcgaaatggccacatccaggggtttctatggaacttgaccatttcagggtttatttcaggattacaaaagtaatatgtatttattgggaaaagtataaacgaacaaaaggaaatttaaacaatctatattctctcaccagagatagttttgatatataaggacttagttttctgttaatcttttttatatgtatattttaacaggatcatactaatgtaagcctgatttcttttaactttactacatataataaatatattttccatcattttaaatggttgctgtgtgttccattaaatgaatgtaccataccatattttacttaaccagtatagtttttctggtaatttttttggaaaatttctctttaatttcccattaccattccacctaaagaaaaaaagtatatttttatgggcagctatctatgcatgcacttaccatacatgttcctcactatatatttgtagctttgaatccctggttctcaggccttaagagttggactgagccatactactggcttttctggttctccagtttgaagagaggccttcccagcctccgtaacacttgagccaattcccctaataaataccctctcatttatctgtatgtgtatatctcctattggttctgtttctctggagaaccctaatataaccactaataggaaaattaggacaatgagatgggggttagttctggagagaacccagtggaggtgtccgcagtgaggtgaggtgaggttgatagttaacgctggtgcctgagacacatgtatgattttcatcacagtagcgaaggattcactctctctacgttgctatatccacttgtaagtacaatttgtaaactctactttggaggaatctgaaggtggtgaggaagtgaaagacctgcccaaagtgacatacccagaaagtggcaggattgatacccaggaagtgtggctttttgggcttcctgtctttaagttaacctcagatctgttctttgcctgccaagagaaggtaaatatgattatgaaaatcttctgtttagtaagctttactggtctctacttttagacaaaatgtcagttgtctgtatatgcagtaccaatatattgcacatacagaaaacttgcatatactgacatgtagttaatgtctcaatactcaagagaaaatattttctccatgcaatggtgaacattcatttactgttggaaatagtcactgcatgtttgcactctaaaccttttgtgattgagtgtggcaatgagtgtgcagtaaaatttttttttcttatttttttattttattttatcattattatactttaagttttagggtacatgtgcacagtgtgcaggttagttacatatgtattcctgtgccatgctggtgtgctgcacctattaaaatcatgctgcagtaaattttttttttaaaaagaattcctctatttaccaaatagctcatcggagtttacatacctctggatcacttcccttcagcatctgataaggcttatgcatacattgtcacttattttcttcataaattagccattttcttctgtcagtaatttatgtccatatctgactataacaactaggattccagtaggatgtggcagatccaggtgagagatgcatatccagggcaccctaaatggaattagctggttctttgtgtcagctcattatctcagcttcactgctgatcctttctctcacagatgccttgaatctaaatcacagtgcctgcttagtaattttacttaaattgtaaaagatgactagcactgtacagtcaaagcacatttaaaacacactcacagtttgttttctgtgacagaaaacaaaacagaaaaatgttttccagatgccagtgcaagcttattgcattggtgtagataaatggtctttgtggattttatttgcttcatatttgtacaaagctttcataatgtactgtcacattctcaccttaagtattttttatgttttttatattagtgtgcatggagccttctaaaatttcttctatgttcactatttttaccaaacttcaatatattatattttcagttaaaaaattagaatgaataagttctctggttgttttatgtaattaatatcacattatttttgccttcagtatcatgtacatggtacatgtttatgagctgttattaataatttagcaacttctttctaaacaaatgattttatacatctttcatatatgaacctaaatacagagcagttcactgccaggtgtggttgagaaatgtatctcaataatttgttgagatgaaatctgttaacttctcctaaactttcaaactgtgtaacaggagggattgcctctatttaacctttaatggaaaggtcggtttcagataaagtcttttgacaaacaacatcttttcttcatgactctgtctcagaatttccttgctaccactttgatcttcttcgtctatttgcctgaggatttctgctacctatgaagacttgcctccattgatttttgtgttttttttctctctcccagagtgaaaaggtacatgcctttcctgatttgcactttgaatgtgtcatcctagtgtcatctggcctccattgttacagataagaagtcatctgttcatcttattgtgatgccatcattacataatgaaattcataatttttctcttattgatttcaagagtttatctttcaacgttttgaagtgtctggtgtggttctctttgagttttttgtacttgtaattcattgagcttctttgaagtatagattagcatttttcatcagtttggaaaatttttagctatgatttctttgaatattctttgtacttctttctgtctctcatctccttcttgtattttgattatgtgttggtttgctaactgctatcccccatttctgaagccctgtttactttttcttctttatttcctctctgttctttggatcatctcatctgccttcatgtatcatcaggtttgttgattcattcttttgcccatgcaaatgaagtgcttagcccttcttgtgaatttttcatgcaaatttttatactcttcaagagtcccatttgactcttttagaaaataatttgtgtttgtatttatatcctctatttgataagacattgtcatcatgccttactttacttccgtaggcatggttttcccttagttctttggacatatttaaaatgactactgccgagccatatctgctaattccaacatctgggccctgaaaaggaagtgtctgttgcctgttttgcacatcccccctccccccgtgtatgtgtcacattttcctgggggtgtgtgtgtggatatgtgtgtgcatgcacatgcatgtgtgtgtatgtgtttgaatgtctcataattccttgttgaaacctgtacattttagatactatggtaactctggatattgatcctctccctcttctagggaaagtttcttgaagttgttgtttgctcatttgtttatttgtttagtgacttggctttactaattatttgaagaatatttttctcactctgtgtggcccctgatgtccctgctcaaatttgtttctttgtgtttatctgttagtgtgggttcgtaggagtcacccctgggtctgcctaaatcatttattgatcaatatttgtgcttaagctggcttagccagttggatgtatgcgtggctttcacggttcagggaatttatacttttgtcctgagttccacaaggctctagtagataagtggttctttctccattctctcctgagagggtgcagcatggacatccatacagtcttccagaccatgataggtgaatgagattttattttattttaactcccttcctaggagtcacccctgggatagagtagcttaatgttcagcaagtatttggtctaaggttgtgcttaagcccctcaagttagtaaggcttttgcattttgctgatggatctgtgtacgacttgggaaattttttcaagtctgttccacattccactcgatttactcctgagtagaaataaaagaggtgtgcattccagggcatgtgcttagccttctttgtctctaggggtgagtgtgattccaagagcactcttctttggtgtctctcagtttccttggtccaccgtttcacttattgttactgttatcatgaagctaccaggccctgcataactgtgtgccaccaaaatctccattgtttttgacaatgctcttaggcgtgaacttctcccctctttgttcccaataaagtcagtctcctcagtcagcaaggcagaaggggagctccctctgtcctcagggcatgccatttctcctgcacagaatctctgtggcactgagtcagagttgtggtgatggtggctctggtctttgtagcctgcctctcttcgtgtggaatgtctaccctgtgagtgagctggggttggggttttaagggccccagtattctcagactttgctcttggcacacagccttgctgcacaaatgggaactgaatggggaaaggagacagagtcctcttagcagcacctgccaagaattgtgcttccacaacacatggctgggggttgaataggcagcgagaggcactggcagcctgcccctttcaggtgaaactctagccctagactaggagctggggagagtgggaacccccgtgttcttggccatatcttcccatagcaaagtttccatcacagagctggcagtaggggtgtagggagggtatgggagcaagtcattgctccagtgccacagattcttgccattcttaccaagatttagtatattttcttgaagagatgtttcttcacttgctgtatgcccttaggaaaatttccagaaactttaaatgtttctttagtttgttttaagtaattttcaccagttaaataaatggtggttgcaccaagagaggatctgctaatctcacactgctattccagaagactccccttcttggcgtggttttttaaggcttttctccagcagagtgacatttagcttatctgatgggctaatccttcattgtcattgaatgtgttcatcaggctgcgacctcttatatctttgtgttccctgtctccagtaatatgaatgctacttcatagtaagtactcaataaacgtctgaatgaatgaatagatactacatttttaaagtgatgtgttgatttttattcacaaggagtgatgcaaacagtgtggactttgggcactgtagggctttgctggctgtggaagtaggttttgactctgctgacccagcataatcatagtgagctcgaatgtttaaaaatagaaggggtatgaagaactactacacgacacacgaataagaagagacaacccaatagcagaacaaacaacagtagcagcaacaacaaaaaatagatgtgtgatatgcctaggcaggctataaaataggaagcagagaggatcaattagcattaaagatattccacctatcaggaatatgacatttaaaacaatgatgtatcataaacttataatcatcagatttgcaaaaattaaaaagtctgacaaagtattggggaagatgtggagaaacagaaattttggtaaactgcagataggactataagttggtataactccttcggggaggaatgcagcagtaacaaaataggttgaatattatatagtcacacactagacacagtaattatactacaaggcatagattccagggaaaactgtcactcatgagcagcaggagacattaatagagagatgcttgttgctgcactttttgtaatagtgaaaatcataaaacaacccaaataggtatcagtggggaaatggagaagtaaatgttaatatagacttacagtggaacacgatgcagcagttaagatgaatagtctgcctctacagagagcaacatatataagtttgatgggtaacaagttacagaaggttgtataaggttgtatgcggtatagtattttatactgtttatgtaagttaaaatacagcaaataagtttttgttgtttatggataccatagcacaggtgtcaactatgtaaagtgtgtaggctgtttttgaacagctcacaagctaagaatgacgtttacattttaaaagtgtaaaaacaaccaaaacatgttacatagactccacctgaccctcaagttttaaaatatttctatttgctcctttactaaaaaagttttctggtttctgcagtacagatgatctgtgtgcccagggccatgccctccatgccctccagcccaagcttggtagacagctccctgaaggccacctctgactttcctgccccaggagttattcttgtgccttggaacttcagttcttcctgggggcagcctgaaacatcagggattaacacactggaggcaaccacagccactgggaatgtgaatcagtggatgacgatttccatatcttcctcttcaaccaaggagcagtgctgaggcatgttcttcatggtccctcacagggacccagcagaattgagccattttgcctaacttggtgaccggctccagaacatgccctttactgaccttccctttccctgccccacccctctcttctggctccttccctctgtttgctggaaccatcacccagataatctgctgtcccttcatcctcattctaggctctgctttggaggactccagactaagacagacatgtgggcagtaaaagaataaaactgccattgggaaggagactggttatctcagggaagacaggaagcataaaaggggttttcattgtatttgttacatgttatttctttatttgaaaatatctgcaataaatatggcaaaatgtttgctttttaaaagctgggtatttacatttttgagtttgaaataatgtaacagatttctatgcgaatctagtcttcctccttgacttttcattctttaggaacctgactcttgtggtgcttaaaatctggtttctaccttggcacattcatcatatcctgaggaaaattgatttactatgagaataaaggaagggtgtatgtatttaactaatagaaaagatgaagtaccacagcaattaaatcaaaagtggcttttcctccattattttgtgcttcataatataacttactcttccagcagaatggtggtggtatctaaaaccttctacttacagatactcttctgaattttatttttaaatttttaaaattatttatgtatgtatgtatttatttttattatactttaagttctgggatacatgtgcagaacgtgcaggtttgttacataggtatacatgtgccatggtggtctgctgcacccatcagcctgtcatctacattaggtatttctcctaatgctatccctccccttgctcccgaccccagacaagccccagtgtgtgatgttccccttcctgtgcccatatgttctcactgttcagctcccacttattagtgagaacatgcagtgtttggttttctgttctagtgttggtttgctgagaatgatggtttccatcctcatccatgtctctgcaaaggacatgaactcattattttttatggctgcatagtattccatggtgtatatgtgccacattttctttatccagtctatcattgatgggcatttgggttggttccaagtctttgttactgtgaatactgtggcaataaatatacatgtgcatgtgtctttatggtagaatgatttataatacttttggtatatactccgtaatgggattgctgggtcaaatagtatttttacttctagatccttggggacttgtcacactttccacaatgacaaatttatactccaactaacagtgtaaaagtgttcttgtttctccatatcctctccagcatctgttgtttcctgacttttaatgatcattattgtaactggcatgagctggtatctcactgtggttttgatttgcatttctctaatgaccggtgatgatgagctttttttcatatgtttgttggccgcataaatgtcatcttttgaaaagtgtctgtttaaatccttcgcccactttttgatggggatttttttttcttgtaaatttgtttaagttccttgtagattctggatattagccctttgtcagatggatagattgcaaaaattttcccccattccgtaggttgcctgttcattctgatagtttcttttgctctacagaagctcttcagtttaattagatcccatttgtcaattttggcttttgttgccattgcttttggtgttttagtcatgaagtctttgcccatgcctatgtcctgaatggtattgcctaggttttcttctaggatttttatggttttaggtctgacgtttaaatctttaatccatcttgaattaatttttgtataaggtgtaaggaaggggcccagtttcagttgtctgcatatgggtagccagttttcccaacaccattgactaaataggtaattctttccccattgcttgtttttgtcaggtttgtcaaagatcagatagttgtagatgtgtagtgttatttctgaggtctctgttctgttcattggtctatatatctgttttggtatgagtaccatgctgttttggttacggtagccttgtactatagtttgaagtcatgtggcatgatgcctccagctttgttgtttttgcttaggattgtcttggctatacgggctctttttttggttccatatgacatttaaagtagttttttctaattctgtgaagaaagtcaatggcagcttgatgggaatagcactgaatctgtaaattactttgggcaatatggccgttttcatgatactgattcttcctatccatgagcatggaatgttttcccatttgtttgtgtcctctcttatttccttgagcagtgtcatgtacttctctttgaagaggtccttcacatcccttgtaagttggattcctaggctttttattctctttgtagcaattgtgaatgggagtttactcatgattgggctcactgtctattattggtgtatgggaatgtttttgattttttgcacattgatttttttaatcctgagactgctgaagttgcttatcagcttaaggagtttttgggctgagatgatgggattttctaaatatccagtcatgtcgtttgcaggcagagacagtttgaattcgtctcttcctgtttgaatacactttatttctttctcttgcctgattgtcttggccagcacttccaatactatgttgaataggagtggtgagagagggcatccttatcttgtgccggttttcaaagtgaatgctgccagctttttgcccattcaatatgatattggctgtgggtttgtcataaatagctcttattattttgagataggttcaatcaatacctggtttattaagtgttttagcatgaaggagtgttgaattttacaaaggccttttctgcatctattgaagatactctcctaaattttaaataacaggtcaaacatgatctaagttgctctaaatatgacgtgaattgatggtaattcaacaaagtgcaaaattttcaggaaactatagttctttgggaaatttcacttagacttcagaaaattaaatctcactgaagatttcaatatgctgtgtaaggagaggaaccaaaacaaaaggacaaaaacagttttttaaataagtgcacacttaggcttacttagagaacgggatgtttttattagcagatttgggacttgaggcatgcaaaactttcagagagagccatatgttcttatgcatgccagccttgcgacagtcacgattctgtggttctgcagatgaaagcaaaacgttgtatagtccttgtggcaggaatgataccttttcctaaagcagcgtcctttggttatgccaagctgttatttggctgagtggctttgcactaaatatatctagagcgatgttttaaaattataaatcttatgtttctccctgctatggactgaatgtttgtgttcccccaaatatacgttgaagccctaacccctaatgtgatggtatttggagatggggcccttgggaggtgtttaaagttatatgagttcgtgagggtagaaccctgctgatggaatttgtgcccttaaaagaagaggaagaggaaaagggagggaggtggggggaggtagggaagagagagagagagaaagagagagagagagacagacagagagagagagagagcatctttctctctccacacaaccacagaggaaggtttatgtgaggacacagtgagaaggcaaaggcagcgtcatgcaagccaggaattgagcgttcaccaaaaaccaaccatgttggcactcttatcttgggcttctagttctagaaccacaagaaggtaaaattctattgtttaagcttacccggtctctggtattttgttatgacagcccaagctgactgatagactccctcatcgctgttaggatggaagccttagtttagtccaaaggggcttgcaggttctggcttttgccagtgtcttcagcttcatctcaagtgctctctccctccctctctgatttgcatcggtgctggtctcttggaggagctatgctttccctatttaccccctgggcttttggacatcctcctcacagtatcctcagtgccggacatacaaaagacattcagtgactatttttaaatgaacaagtggtagaaattagaaggtagtcaggttctgacctgtgatggcagaggaggagatactgtgatagggaaacaagcatataaaaaaggcaacacatttgactgttgtgtctgatcatgactgttttaaatgacatgagtgttgagtaggccaactcactttcactctttttttggacttcatcatattctcaacaacaatcataacagcacattaatattaccctttaaaaaataacctgtttaaggtagtactgttggagatggtgaccggagttgttgctaattactctttttttctgtaactgccttttgccctcaaggtttgccactggaagaggcatatctggtgggaaagaggaaaagacaaatgcatggtggttcaggggaatgatatcaaagagaattaattagaaattggaagttaaaggaaggataagcagatcaaattagtatagaggttggtatactgttccactgcctccttgtctgttaatgtattctggagcatatatcaggcctacattaggcactgggaaagagggatgaacaagatcaaaatcactgccttgcaggaactcagaaagtttgtagaggcattcatataaacaacgatagtttaaaatactgtctaacaagtgctgaatggttaggcacaggggccatgggagcacagaggggtttggaagtcttcatggggaatggtataattggcctagtgataatatgattcaataggcctataggcaaaggaaggagattatggatttattattgaaggacagtaaaacctaattgattttaatcaattcttgttcatttccaagaaaatgttcaccaacagcttttagcaatataaacagttatgagaagcaaattttaaaaaatttaaaagatttttgcacactgaagttgcatattgattatagccaacccaaatagatcctttcctgggaacagaagtttgagtgggtttggaatcaggggacctgggtttcagtcctctctctgtaacacctggctgtctgaccatagcatacctggtcacttcactccccacgtccttggcagttcttactgctgctgccttccccactcttcagcacaagtgtgtacccgtgggatgatatcttcccatcaaatcataagtttaattctacagtgattcttttttgatgggtggtcagacctcctctttcctacaaccctcaccccatgtcagaaatataatccttcattttgccaaagcaaaacgaagttagactgcatatgctaatgaatgtgtttatttccctctcacattctctttttttaaattttttttatttttttcatttttttattattatactttaagttttagggtacatgtgcacaatgtgcaggttagttacatatgtatacatgtgacatgctggtgtgctgcacccactaacttgtcatctagcattaggtatatctcccaatgctatccctacccatctcacaccagttagaatggcaatcattaaaaagtcaggaaacaacaggtgctggagaggatgtggagaaataggaacacttttacactgttggtgggactgtaaactagttcaaccattgtggaagtcagtgtggcaattcctcagggatctagaactagaaataccatttgacccagccatcccattactgggtatatacccaaaggactataaatcatgctgttataaagacacatgcacacatgtgtttattgcggcactattcacaatagcaaagacttggaaccaatccaaatgtccaacaatgatagactggattaagaaaatgcggcacatatacaccatggaatactatgcagctataaaaaatgatgagttcatgtcctttgtagggacatggatgaaattggaaatcatcattctcagtaaactatcgcaagaacaaaaaaaccaaacactgcatattctcactgataggtgggaattgaacaatgagaacacatggcctctcacattctcttacttaacctctgcttgccagcttagtgaaccagtgtactaaagaactctggtaacatgagttgatttgataagaaaacttaatataggtcccttctagaaaatgcactctcagtcgagaattgcattttgaaatataaatctcaagttcatcactccagttcatcactccataacaggtgcccgcaggcacattattttgcttttcaagatcatctggaatgatgccatttagactaattgccctcaaccctttaatttacctggatttttggaaagtatctttgtttcctcattcagccacatgtttgtctgaggtagaagcattttggaagtttacagtcaccacatccatgagttttcatgtgatgtcaccttgttcttaggtaacaggacaaatattgatgctcatagattgacactaatctcttgcattggtaaagtactttacaattgacaaagcacttactcaattatactgtacagtcttcacataatttcgtgtataactgtcctgtgaggtagcttttagttatccatatattagaaaagttaagaggtaagacattttgcccacagttttcaacctagtaagtagcacacaatgtccattaacagttgaatgaataaacaaaatatggattatccatacaatgaaatattattcagccataaaaggaatgaagcagtgatacatgtcacaacatgaggaaccttgaaaacataatgctatgtgaaacaagccagagacaaaacaccacataattatattatttcatttatataaaatgtccatagtaggtaaatccatagagacagaagtatatgtgtggttaccaaggttggaatggagttgggggaaggagcctgggcagtgaaggctgtaaaaaaattctttttggtatgatgaaagcagtgtaatatttgagtatggtgatgattacataactctgtaaatacactaaaaatcactggattgtgtactttaaacgggtgaactttatgggatataaatgatatctttacaaagtaatgcattcttctttcccctacattccagaactaaaggacaagtaacttcaaaagtgctgcctccgggctcccttcctggtacctattctgcttcacttttgccacatcatgagaaggggtaaccagtctcttaagtcttttctttctaaatattcctctgtctcttcctctcaggtctcacttgaacaactaaaggggcagcctcctagaatcctggtattcactacctaccactcactggcagatgttgacattagcacattactaagcctaagcagaattaagagaaaaggaagccattagtgccaggttggaatcctgcaataggacttagcacctgtcctcagtttaatgtatgagtataagcaccctgaatctatagaaaatccagaaatgtccattatttataaaatgctccctatatatttgtgtttgtgcatgtgtgagatttgtatttatgtaagagtatgacatatagctacagttgacccttgaacaatacttacttgaactgtggggtccacttatacatgaattttttttttcaaccaaacgtgggtggaatatagaatattcatgggatgtgagccctgcctatgcagaggaccaactttttgtatatgtgggttctacagggccaactgagggacttgagcatataagattttggtagacacaggggttctaggttctagaaccaatcccctgcatacactgagggacaactctgttggcacagagttgattgaggcagtaggaaatgggaagataaagctggcagctctttccacacatggaaagcataataggaaagaagggcttaagttagcaggtaggtggtgtgggattcagggacattactctgcgtatatgtttcatctattgcagcagcctttcctgttacatacttataccctgtgggggcagtggacaagtacagttctgatacctgagactgtgcgaagaaagcaagccaggaatttgtgtgataggggagactccacaatttctcgtttgattcagcataagcctgcattgttggggtatctccaggaagtcagccccagtgcaggcagcagacctcacggcatagggtggaagcaaagtggagcatctgtcagtgcatagccttcttaagcaatgatgagctgcttagcattcaggacattcagcccaagattataaatgaaatgtgtttgtgtgtttatatgtgtgtgtatgtatgtatggatatgtatgtctgccctgtcactggaaggctttttaaattttttgatttagatcatagaatttctagagatactaattttcaaattttatacctcagacaggaatccatctttctgagttttgtgtagttatatttttggtcctaatttgtcagtaaacaggacttttatttcctccatagagaagtcagtgatttttctgtctggggtgtcttcttgcatgccccctggttgtccatccactttcatgactacctctgcagtctcttcatatctctttcttattgttacctaaggtaaagcttacgatttattattgtatctgtgagcatggtgccagtagcttcctttggcttaggaaggaagaacatttatctcaggatagagcttcactgccacatttggtgacataaaatgctatatggagaactgactatactgaggtgtgaaatacatgtaggaagtctctcaaatacattcagatatccatcggcttgcagtttgtccctgatgttggctttctgtgaagctgaagtgcctaccttgaatggatggaaaaaaactgtccaagtctttgtgccctgtagccgtcaattactgtacttttcatgagcattgcctgtggttccaaatgatatttctataggcagaaagtgagatggaagagggaaatattgtacacaaaaatatgaggatgtgaacagagcaggactgttcacaatagcaaagacttggaaccaacccaaatgcccatcaatgatagattggataaagaaaatgtggcacatatacaccatggaatactatgcagccataaaaaaggatgagttcatgtcctttgcggggacatagccgaagctggaaaccatcattctcagcaaactaacacaggaacagaaaacaaaacaccacatgttctcactcataagtgggagttgaacaatgagaacacatggacacagagaggggaacaccacacactggcgcctgtcagggggtggggggctaggggagggatagcattaggagaaatacctaatgtagatgacaggttgatgggtgcagcaaaccaccatggcacatgtatacctatgtaacaaacctgcatgttctgcacatgtatcccagaacttaaaatataattttaaaaaataagaaaaaaagtaaatgaataaataaatagaatttatctgagaaaaaaatatgaggatgtagttcctattatctgattcctagtgtcctttggatcatgcttattttgtctctaagcccattgtattaacctacatcacatatacgcagtttgcactgctggaagctatcaggctctgtaatactgactctgaaatgattgtttcagccgcaccctactgctacctccttgcccgtcctctgagcttgcttatactcattagggaaacttctttgactgttatgacctctttctttcctgattatccctttactttctgttttttggttttggtcgttttcgttggttctttccctgcctcgtctttaattgttggtgatgctcagggttccttccttgactcagctgtactctggagatgcatgttctccctgagcagtcgcctttgagctctggcaacacactctcctgtgcatatgccacatgttttgcttgtttgctttttgtcatgtaggaacttctgtgtaataaagcttcttccctaatcccatgtctgttcatctggcttacttactcctttcagaatcagcccagcctacaggaagcttttcccagcctactcttctctctcaactatgttctaattgtccatgagggtattctgtactttggttaatgtatgtacaccattgtattgaaatgatttgtttatatatacagtcatctaaacaaaactgcaggttcccagacagcatgtgcctgttttatttgcatttaaaaccttcagtgcttgcaaagtcccaggtatatagtaggcattcaatttgagtgctgctatattcattccatttggtggatttaatcttaagatgtttttgtctctttttttctgaagaatggaacttgcaccaaaataaccctaatctgaaaaaaaaatgtgtcatggcattttctttttaagcaccttgcatagtactttctcttttcctccctttcctaatatatggtctgcctgtgttgtactataaatagtactgcagcaggtagaaattgtagcagttagggttctccagagaaacagaatggtgagacatggatatacatacatacatacttatgtatacacacacacatatacatacatatatacatatgtgtgtgtatatacatacatatatacataagtgtgtgtgtatatacatacatatatatatagagagagagagagagagaattttatttcaaggaattgcctcatgtgattttatatatatatatatagagagagagagagagagagagagagagagagataattttatttcaaggaattgcctcatgtgattatgtttgacaagtcagaactttgcaggtcaggtcagcaggcttggaaactcttgctcagaagctgatgcttcagtctagaggcagaattccttcttcctcagagtcagctcagctttgttcttagggcttttccattgattggatgaggcccacccacattatgaaggataatcttctttacttgaagtcaacagattgtagatgttaaccattttcacaaaacagcttcacagctattgcattagtttgattgaataagtggatactgtagacttgcgaagttgatgcatgcaactcactgtcacagaaataagcatgaaatttgtagttgtaacgtatcttagaactcttctgattacccaggtccaccctgttgtggctccattttgtggatgaggaaacaggcccagggtagtttgtagtttcaattcacaaaactggttagtagaaaggggctagccagaaattttctcttaacaaatgagaaatcctgattgacttgctttggccttgtcaacagagtcatcaggcattaggttctagaccacttattaaccagctcagaaatcccaaagtaattattagcacttttttcttctctttatgagttgcttttttttttctcaaggggatttatgactagctttaaatagaattcgaaaaactactacatgtcataaatctgacctcaagtcttagagtctgttattagcagatactgtctttttatattttctgtaacttcaatggcttattgcagtggactatgaaaatgtataaaattttttcctattgccagggatgggaaactatggaaatgtcatccctgcttgctgaactgccctcttaaattgccccttatctgatgatgaactaaattatttgggggagttgaaaaatagagaaatgccagttaattttattcagcacattgtatatactcaaaacattttctgtaaggcaaaaacaggaaaccttgcaaacgaaactgtgggtaatatgtagttataaaccatctttccaggaaggagctgaaagctctgcatgatccctctattataaatttttccaactccttttgaaggatgttaagtaatttgccccatagtctatgggaatttttcacctcggggaaatggggctgagaaagttattacttttaaccccagtgaaccacaccagaaacagttacagcatcatacaaatcaatttctgcattttccataaagtgtttggcaaggaacaaaataggctggaagctgggaaaaaggccaagtacttaactcactcaaactcattttaaagtttttagctctagatattcaaagaaaatcagtgttcatcctgttgaattcatgggaacatcattgttttttatattatataaaaggaaactttccaattttcttaaatatacaattttttgatagtgagaaataaaattatctcaatttagatagacaaaatgcctttactcattttctaagaaaatcttaaatttccggataggaaaataaatatatattttttgaaatccattttcaaaacatcatggcatttaagcattccaacttaatgacagctgagaaagactgctgtgagacatatactgcgtaaagtgaatccaccctgtctattatacatggggataccaccatctggaaaaacaagatctatgtatatttagccaaataccaaaagaatactgctgaaatttcactctcctgtttccctctaagtatttgatatgtcatcaagtattgtattgtattgtattgtattgtattttttaaatgttttggtactttactaaataacaaagaacttttgcacagagtcagaggatggtcttttatttattatcagaggtgatgcctttctataaatattgagaatacagtagtgtcctacagggatagctatttcgtctttctaaagagcttgtgcattaagtaatgttgttctttaataatgcacttaaattacatttagatttttttgctaaatgtgtgaaatcagtttaaaattccatctttcatttaagactgcttattaaggaataataatcccttatttaaattatgatttttgacagttgacaaagtgcttttacacatattttctcatctaattctaaaaacagatctagtgttagatgatgttggttttcattcctgaggtgaagaaattgaggcagcaagagtttaggcattttctttttcacgcaactattaggtgacatttccaagactggaattcatgtgtcttgactctaaatccaatttttaaaaacccttgcctaaagtggctctcatttactgaattgtcaacggtattctttgtacatataaataaattattttatggattgccccataatgcagattaggcaggataatttatgaattctgatttctactcttaaaacctatgcatacttaatttatagaatgttaattaaagtaattctgttttaatatgagtaaaattatggtgatttttcaaaaaagtattttggaaaagtattatgtttattttctatcaaatgtatgtgggtatacacacaaaaacacatttgcctacatatgtgtgtgtttatatatgcaaatatgtgcatatgcatataaactaaaatacatgtatttagacggtagcaagattaagaaaataattaggtcattaatactaattgcagttgtaatgaaagttgtatagtggatgaatgcagaatagttaaaatgaagatagaattttctttagccttggctgtaagtaaaatgtaatacatcacacagtttgttgaattttcttactctttccctgtttttgatagagtaaaagatatactttggagtggagattaaactcttaagagatacagaccaatgccgactcatagttaagggtccttatttaacttacatgcaatttttggttttagaataattcattgagatatatattttctgctctgctcttcaagcgctgtgttaattactgaagtctcagacattttcaaataaaagaacctgtgatatatgatctcttccattaacagcttacaattcatatgagcaaatatgcttagcagttttactcaacgagtagttcgttccaggtaatccaacagatgatgtctcattaagagtacagaggaagtctgataacttccagctcagatggggagtcacagatgatggagaaggtgtcatctgggtgggcgtttttggcaattggtagaatttgaagagtagaaaaggaaatagtttcaggtacaaagcaaagggaacaaacagcacatttggtggatggtaaggaaacctggctttgcatcatgaatagtggctgaacaaaatcagggaaattaagaggtaaataaactggcagtgtgggaggtatgaataaatttggtcttaagtctattgaatttcactgatgatgcggttttcaaggagacctttttaaatggcagtttggaggcacagtggttggctcttaagcatttagtaaatgaaatgcaatgctgggaagaatcagagccacccctagaggatggaatgtcttctgcgtagaggtgacagctaactgggggaggatgagtcattattggaaagcaggacaacatcctttgggctgagaacagtggccatttatttaagctgtcgctggctggtggtcctctttgacatttttcttatttggtatatggaaaaaatatagcataagacatccactactgcaggcttaaaattaagacttttaatttaaaacgtgagttgattgtattatttattttcttttttgaaatttgagctgtttgaaataccatcccagagtgaggtgagcagtcttatttgccttgatttatgctacctctaagtcatcttaacattagtattcacaaaactacattgcagtgaaattcaacaaatctttactgaatacctcttatgaggaagacgataaagaataagaggaaaatgagatttttagtttgtttggaatacagagtgtatgggaagtataatagattagaagtataaagtctcaatgctgtactaaatgggcaccattaaaggttttgaaccatcaatgtttttaggtttttaaatggtacaggagagttgtttttaggagttgtttttagttttttggatgatacagggggacatattggttcacttgttctgtttgattcgcatatcttttgcttttaaataggtgaacagtttctcaaatggcaaatatgttagtcaaagtatactaagtggcatcagataacattcagtactgtgaagtgtcaattttagatatcacctcagtggaaaaataatagcatcaaataaacagtaccaggtaaggagaaacagagctcttcattattggccagatggactcaacaagcctgtgttcctcaccttgatccttatgcataaaacaaaaggaagttttaataacatttaaagaaaaggaagaaaaaatgtttgccatactcctaaggaatgagtcagttgttacatagtctgctgttaaattcggggccttgatatatttagctcctttgtgacttggaaaaatagcccagagaacaatatagatgttatttttaatattactttttcccccaggaatctaattacgtaagaaattttttatatcaaccaaccattcaggccagtataagtgtatcagtacataactgctaataacatcattcgctatatttggtgaactgtctctctcagcagctcaaatgtcagtttttatagagaagaggaaagctctctcttgttcgcattctcattgaggcactcctccctccttcttcctttccctctcttcttccctctctcttttgtgaacacacacacacacacacacacacacacacaccccaaatagttaaagccaatggattgatgatttgaccccgttgtgttatcaagactagttctgaattactaatggccagtgggatccaagtatctcatttgatagagtgatgcagctactgtggtgctatgctgtggatggatgcaagaagaggggaaattaaaatcactctatatttaacagtataggattgaaagtgtgatgtaggcccttgtgcttttgataagggaaatggtttattcactagagttggtcaaaatgtgattaacacagggttaccaggattctctattaatgaaagcatctctcagctatatatttccttgtgtgtctgttttttaaatgaaattaaatatcacaggtcacaggtcacatgaaggggtctatctataatgattctctttgacaacaaatggaattttggaatatagtgagtttcctgacattggagacagccatgtagaatggagacaacaattgatttggggttttgtagaaaatattttttattgtgtgggaattcagctagattagagtttcctagcccaaatttaatggtaaaccatgtacttgaaaaataagacaagaggggactgacatgtgagccagaactgttgtcactgagcaaaatgagagatagggaatcagtgtgacagtaaaaattggtttggtgatagggacaatattaataacctttaagaccccctctattcatgagtttctgtaacttaaacctgaatatgctcgtcaactcactggcacttgaaatttttttttttttttgagtctgagtctcacctgtcacccaggctggagtgcagtggcacgatcacggctcactgtggcctcaacctcctgagctcaagcaattctttcacctcagcctccagagtatctgggaccacaggtgcacactaccatgttcaactaatttatttttatttttgtagagacagagtcttactacgttgcccaggctggtctcggaaatcctgggctcaagcgatcctcctgcctcaggctcccaaaatgctaggattacaggtgtgagccactgtgcctggcctagtaggttcttaactgaattctaacccccgcacccaatttctagtttgctaaaaacccttaagaatgcaggatgcaggccaagaagctggcttgccaaacaaggtcacagttggtacaggcttcaggttaggtggtattgatgtcagaaaaatcctaaatctgtgaagactgctgaaataggggatcatcagtcagcatcactcagggcacaagttaagtgagagggctgatatcaaggattaagagttaaggcagtgggtacacctctagccttgtgagtctaatggaacttcagacggaggcatccagcaccacggacagctcttcagagctgttgggtggatgtaaaaactcctaggggtttttcctggaaaaactgcttctaattcttcctagctaaagatgtctactatacacaagtatcggactttatgcaaccctctcttttctcatcttcaatgtagtaataataaatgttctatatagttctctgggtacacatattaaatgataaattgaaagtatgtgtcagtgatacaaatttaataacctttcactttgaatcattgccctttatctacctaagattgtattatgtcaaggaaaattgccagcttcttcttaaagtatgaaataacagttaaataaactgatgggagaaactgtggtatggtaaacagatatacactttattggtgagagataggaactaggatttattgtataccatgtaggttcagacatatgctcttacaattcttatgccatttaattttcataaccgctctgtgtacctatcaaggaatggaggggtcagtccatgtcatgctcttccactgcgccatatttctcctatttctactgatgggatggaatgggtgacatctggtatgcagggccagagtgatgatagaattccaacttgtggctgtcctaagagtggtctcttctgagtgttttcccgatggcaggaagtgggagtgaaggacagatagagggggtaagcaacacagctcaggtcccccaacaaggagatatcagagcattcctggccaggagatggagcagggtatccaggggccctttggaatgaggtaaaccaggttgttgctgagcttactgtgggttggtcatggtaggaatcttcttaaagaccctcaacctagctgctattgaaggaaatgaaaaaccatactttgatatctgtgtgcgataactttatgtaatacagtgacaacttagggaaaagcatctatctttacaattagggtattttaaagggaatgaaaaggtcttcgtgccattaacatttagtatttgtgtctttgataaaaccagagtatcttttgtgtgatccgtttgtatttaatttgaatcattatttcagaatataaaagtgtatctaatttttttattttattttttgagacagagtctcgctgtcgcccaggctggagtgcagtggtgggatctccgctcactgcaggctccgccccgctgtgttcacaccattctcctgcctcagcctcctgagtagctgggactacaggtgcccgccaccacgcccagctaatttttttgtatttttggtagagacggggtttcaccgtgttagccaggatggtctcaatctcctgacctcgtgatccacccgcctcggcctcccaaagtgctgggattacaggtgtgagtcactgcgcccggccctaattttttatgaacatgaattttacatgtggttagtgactgtttgcatttgttatttgacaaacataaaatgtatcataatggaaaatgatcaagtagcaaagaaatgccttcaacagctttctatatgttttggcttatgtacttaaggatgtagacagctttatgagacagactatactatacaagtacttttgtctgaagattagctgggctgagactttttttcttttcataacagtttgatagatgtttgtgattatctgttcaatagcccatttaggactaggttgaagaagcagcagttttctgcataggtagcatttgagatccattatcagagggaaatgattattgtatgatgctgttgtcccttagaactttcaagaggaaaatgttaggattaggtagttatataatgatttgtttgatagaaggagcactgaggttgaaatcagaagatacaaatttgaatgcttgcttctatacccaccagatgcatagcctttagtaagtttttcagaccctcagagccacagtttgctgctataaaaatgagactctccacctaagtcagggaatggttgtgagattacattagatgacatttgtgaaagtgcttaaaatttctaacacattttttaaagaaactgtttataataattctcctttgtggttattttctacagaaagtgagtgagaaggttggaggagctgaaggaaccaagctagatgatgacttcaaagagatggaaagggtaagccttcactactgcctagtgttccctttgacataaacatgtctaccataattagaggagaagagaaaacgggagagggcaactgttttccactggtctctgagaatactacattttgttatttaaaactacttttcatgtatgttttaaaacataaaatgtaaaatattctgtcttccctttgtactgtcctgaggacaaaacctcagtgaaggtgaaaggtcacgatgaactttttctggtgggtttcatcatcattttaaaaaaataaggacagtgttgagctgatgtttgaattagggtgagatgcgtagaaaagaagctgcagaatgacatcccaaatgtttttgggagagtttaagtcactttctggctttaaggaccttccttactggatgattggccagaggcagccatgtatagtggagagaatacagttttagagcttgtccaaccttggcccaaactccccttcctgccatgtgtcacaaaagtccatctattgatcagagcctctttttaaaattttattattattattgttattatttttttgagatggagtcttgctctgttgcccaagctggagtgcagtggcatgatcttggctcactgcaacctccgtctcctgggttcaagcgatctcctgcctcagctccctgagtatctgggattacaggcacgcaccaccacgtctggctaattattgtattttttgtagagatggggttttaccatgctggccaggctggtctcgaactcctaacctcaggtggtccgcctgcctcagcctcccaaagtgctgaggttccaggcatgaaccactgcacccagcagagcccctttttaagtgaatgtaaaatgagaagactaatactcatttgggggattttagttaaggcttaaaaataatgtagattatttagctttctgcttaaaaggtaggttctcagcaagtgagggtagaagtgatgaacaaaacatctcattttatttttcttgggacatgagccatattttcgcttttacttttcttttactttaacgctcttcagaacaggtgatatttaggcttatgattaaaagtgtgtgttacattgtgcacagaaacattttaggtcttaagtgggtggtgggtaatggatctgagagtagcaatcctgtacttgaacagaagaggatgttgcaaactatggtacctagaaaccacatttaaacattgtaaagaatattgcttttgtacttcgttgtaacaaagcaattttttaatattctgattttgattctaccagaagttttttagggactggatattgttttagtctacatcagatccaacaggctgcctcagttttgctgtttttactatgtttgcatgaagagtcaaacaaaaaattcctaggtattcattagtgtagtgtgagaaattaaaaaaaaaatcctaggtactttctaccttgtctttttagtttttctcttggtgagtttattgatgaattcaataaatattttctttgtgtcttccatgaaccaggaggtaggatatagacaaggttcctgagtgcatgaagttcgtagtctagtggggagggcaaacttggggcaagtaatgaccagcgtggcgaggaggaaaactaatggagctacagaagcccagcacagaggaaactcacccatactgcattgtcaaggagaaccttcctgatagttaagtgaagatgggaaagagttagcagagcctggtaaaggaaacagcatgcaagcaggcaagagggaacggttgagttcctgaaaaaaaaagataagttgccaagaggcagggtcctgtgaaatcagactgcatagtattgatccagctggtcattctggctaagttcttgagatagacctcactgatggatacccagtggtgaggagattttatactggaattctgagtcccagccttcagaagtctggaaaaccagactcttacagctgaggcctggcacctacttcctccaactggaccaaagtctgcattggttcctatttctcatctctggatggttctaaataccacctgatcctcaaccaaagctggtagccactaatatccatagttctggaaataatattttacccattcatcttctacggcatctgagactccaggaactgacacacatttccagaaatgtcttgtctttgactcttctactgcccataaaattggagttcctcacgcttcatttgaacagcccatgggttaatccgcctctgtcttcacccagtcttgcttgatccctccttgtactttgatgctcctccttccccctcacccctggagagcatttatagtttgccacgtggccaatgtcatgtcattaatgaaagattaggcaggtatttaggaatttggaactaagtaccaggaatcagaatttgacacttccttttagcatctgccaggactaaagggaataagctaggcagctcactgtctaaagtgagacaagctaacttcctgtttcttaaatgagactaaaaagaacaggaaatttggagaactgagtagaatttatcactgagcaactaattagacctttggagatttattttggtgagaaatatatgccagttttgcaaagtaattgaaataaaagagaatcctccaagcattttactttaggcaaataccaacagaccttcctctgagtatgaaagtaaggtataaggattatttctcctaatttatagaaatgtttctgaaacttttatttcaaaatatagatactcctgcagcaaagtaaacatctgattgactgaagaacacactcatggctctttacttgggtttatacctgaataaattgagagatttaggtttcagtgcagtgtggcaattgttttactctttttgattctgtatatcttttgtttctgtctctattgcaaattttgcaccctccactcatgctaaatttacatgaatagtataagatttctgtggtaattgaaaagcacttgctttggatttagactctcaaatcttttctcgcctgttaattgattattcacacaaatgtttgagctcagtgttcccaagcagacagaagaattgcctttccatagtttgttttctgctcgtcaggcatttggggtagagagacctttgctcatctgtattctcggaggtgcaattagataacaaaatgaaataaattagaggtttgcttcaagcagcattactgggagagagaagtgggttttcctaggggtgtttctctaatcagccgccccagccactctgtggctgagatgcagtaaaatcatcatgtgtgtcccttagctctgcagccctcctctccctgagctgattggatagaatcctgcggctgtgctgtctctgtaggatccctgcccatcattatttctctcctaagtgccttgcatggaattctttttgttttcattttaaatgctgtctgttgcttacaagctttgttaaacacaggctaaatgtcttactctggtgcaacattggaggatttgttctttgaaaagctataggattttttgttaagaggaagttcggaaatttgaagaacctctggttccttctcaaattttcctcagttgctgcaatgattgtgtagttttttgttgtgtgtacagttacattcattaatttacttggaaagtgcctccatgttaaggcagtatccctgccttcaaggggcttccagttttgatttttaaaaaattgtacgtaaatcagtaccttacagaacatagtgcttggtgtcctggggaggtttcccatggaatattcaggctgggtacatcaggcttcctagaagagagagggcgtctgagctaaatcctgaacatgtctcttgtccctgattatgtggttaattcagaattctaagctgaggaatatagtatctgttttgcagcctgaaaattattgtgggaaatcccttctgttgaacccagaagatgtcctagggatagaaacatgtctataggccctttaataaaaatgggattctttttaaggagcaactttgagttttaagaagagcaagttgttgagaaagaatgccatttcatatgagagtaagagaggattattggcagattcaggtgtggagaaagtccaataggaaaatgtccatggtcattatcttcatacactcagtcactgggtggagaggggttcaatttttctatccagcccaagtggtagagctagaattaatgagtagaaaccatggggagatagattctggctcaatataagaaaaacttttggctatcaaagctgggtttttggtgtgtgtgtttttgtgtgtgcgtgtgtgtgtgtgtgtgtgtgtgtgtgtgttttgcctcagcaatgactgaattccctatcactgcccatgtttgacccccttgttcccaccgcccatgttggaacacacactgacctgctagttccctcccatcatgtgaggcacaccagtcatctcttgtgagttttgtggttagtaatttgttactaataatgtcactttttaatgatgtcactcttacttggattccagtgatctctctcaaatggggagagaaaggagtagagtttcagctggaatgctctgagcaacacgtatccctgagtgcacccataatgtctccttcatggtgtgatgggaaaggaggaggcgtggagcattgtgctaagacacacccccccggtgtggggatgtaagaagggccagagctccaaacaagatgagctttgaagacatctttttccttagtctgaaattcagtgatgacaagcttcctctgagttacatgtttgcaatatatagttccaagcttatattcattaaaggtaatgaccaagaagattaacagcaaaaaaaatacattggagcaatcacagcattctaataaccttgtttatttttgttttttaacacgttgtttgtcagttgggctttctgaaaacataagataatgctttaaatcaaagcagcttggggacagatggattaactcttctgagtcagcaggggactattaaaaacatcactcttggacctgcctgtatctcgctgccagacagaccttcccaggacacggttttcatcatgtctctgtgattgtttattgagctgttcttgttcaggagtctcagtactttaagtgggtgtgtatgcattattaatagttgtagtttcttaacttcagtgacagaaaagttaagaatttgaaaatattttagtttttcatatgcctttttaatatttcttttatgttaccactgtgagttacccattttcaagtgggtgtgtaattcatctacttatttatctaatttatttatttacttacttatgtggagattgaggtctcactctattgtccaggctggagtgtagtagctcagtcatagctcactatcacctcaaacttctgggctcaagtgattctcctgcctcagcctctcaagtagctaggactaccagcacacaccaccatgcctgcctaatttttattatttatttgatatttgaggtccaatttctttctttttttaaacttgtatcttaacttcaggggtacacgtgcacgtttgttacataggtagacacgtgtcatgggagtttattgtacagatgattttatcacccaggtattaagcctagtactcattagttatttttcccgattgtctccctcctcccaccctccaccctccaataggtcccagtgtgtgttgttcccctctgtgcgttcttgtgttctcatcatttttgtcccacttataagtgagaacatgtggtatttggttgtctcttcctgcattagtttgctaaagataatggcctccaggttcatccatgtccctgcaaagaacctgctctctctcttttatggctgcatagtattccatggtgtatacgtagcacattttctttatccagtctctcactgatgggcatttgggttgattccatgtctttgctattacgaatagtgctgcagtgaacacatgtgtgcatgtgtctttataatagaacaatttatattcctttgggtgtatatccactaatgggattgctgggtcaaatggtatttctgtctttaggattttgaggaatcaccacactatcttccacaatggttgaactaatttacactcctaccaacagtgtataagcattcctttttctccacaaccttgtcagcatctgttgttttttgactttttatctcattgtggttttgatttgtgtttctgtaatgatcagtgatgttgagtgttttctcatatgtttcttggccacataaatgtcttcttttgaaaagtattcatgtcctttgtccactttttaatggggttgtttgctttttttcttgtaaatttctttaagttccttatagatgctggatattagacctttgttggatacatagcttgcaaaaattttctctcattctatagcttgtctttttactccgttggtagtttcttttgctgtgcaaaaactctttggtataattagatcccatttgttaattttcgccttggttgcaattgcttttggtgtcttcctcatgaaatttttgcccatgcctatgtcctcaatggtattttgcctaggttgtctttcagggtttttatgattcggagtttatacatttaagtctttaatccatcttgagttaatttttgtatatggtgtaaggaaggggtccagtttcaatcttctgcatatggctagccagttatcctagcaccatttattgaatagggaatcttttccccattgtttgatttttgtcagatttgtcaaagaccagataactgtaggtgtgcagttttatttctgagatctctattctattctgttggtttatgtgtctgtttttgtaccagtaccatgctgttttggttattgtagccctgtagtatagtttgaagttggatagcatgatgactccagcttcgttctttttgcataggattgccttggctattcaggctcttttctgtttccatatgaattttaaagtactttttcctagttctgctaagaatcttaatggtagtctaataggaatagcattgaattcataaactgctttgagcagtatggccattttgatgatattgagtcttcctatccatgagcatggaacgtttttccatttgtttgtatcatctctgatttctttcagcagtgtttgtagttcttcttgtaaagaacttttggccgggtgcagtgactcacgcctgtaatcccagcactttgggaggctgaggtgggcagatcatgaggtcaggagatcgagaccatcctggctaacatggtgaaaccctgactctactaaatatacaaaaaattagctgggtatggtggcaggcgcctgtagtcccagctactcgggaggctgaggcaggagaatggcttgaacccaggaggtggagcttgcagtgagccgagatcacgccactgtactccagcctgggcggcagagtgagactctgtctcaaaaaaataaaataaataaataactttcacctccctggttagctgtattcctaggtattttattatttttgtggcaattgtgaaggagattgttcctgagttggctcttggcttgactgttcttggtgtataggaatgctagtgatttttgaacattgattttgtatcctgagactttgctgacattctttatcagcttaagaatctttttggctgagactgtggggttttctggacataggatcatgccgtctgcaaacatggatagcttgacttcctctcttcctacttggatgtgctttatttctttctcttgcctaattggcctggtcaggacttccaatactatgttaaataggaggggtgagagagggcatccttgtcttgtgccggttttcaggggaaatgcttccagcttttgcccattcagtatgatgttggatatgggtttgtcatatatggcacttattgttttgaggtgcattcccttaatacctagctcattgggactttataacatgaatgaatgttgaattttattgaaaaccttttgtacatctattgagataatcatgtgtttttcttctttagttctgtttatgtgatgaatcatatttattgatttgcatatgttgaaccaaccttgcatcccagggataaagcctacttgataatggtggataagctttttgacatgcctctggatttggtttgccagcattgtattgaggatttgcatcagtgttcatcaaggaccttggcctgaagttttcttttttgttgtatctttgtggctaattttaaaatcttttgtatagatggggtctcactttttcccaggctagtcttgaactcctggccttaagcaatcctcctatcttggcctcccaaagcactggggtaacagacatgggccaccatgactgactgaatttatttatatattaatgatcactaaactcacaaagtgttggtgctccctttaaggtgtctatgtttttcttaaacttttgctctgctacagcatctggtataatgtggtatctaatagtatgaaatcatatctttcagtccttttgttgctccacaaacaacgccacgctgttcacgagtccttacacctaagttcaggaaataccaacttttcttcagggaagaaaggtaatattcccatgtctctggaagagtaaccccattctagtcatttccatgccttctattctttagtatcttgtctctaaagactgagacagctggtgaaataatcagtatcatctatagattcagcatggcattattattagtgaagctagcacctagcacaggaatcaagatttttttgtaagtgctttaggtttttggggccagagggtctctgtggtctcttacaactccttgccaatgctgtcaaaacacaaaagcgtccattgacagcgtttaaatgaataagtatggctgttttccaacaaaactttatctaaggatgctgaaatgtgaatttgaaatttgaataattattttgtgcagtaaaatagtagtctcatttcaaattttttcaaccatttaaagaagtagaaatggaagtttttattacctaaaaaacatgcctgtatctgtatatatttacagtttcactttcttttttttatttttattttttattatactttaagttctagagtatgtgtacatgtgcacagcttgcaggtttgttacatatgtatacatgtgccatgttggtgtgctgcacccattaactcgtcatttacattaggtatatctcctaatgctatccctcccccctccccccaccccacggcaggcccccatgtgtgatgttccccttcctgtgtccaagtgttctcattgttcatttcccacctatgagtgagaacttgcggtgtttggttttttgtccttgcaatagtttgctgagaatgatggtttccagcttcatccacgtccctacaaaggacatgaactcatcattttttatggctgcatagtattccatggtgtatatgtgccacagtttcttaatccagtctatcattgatggacatttgggttggttccaagtctttgctgttgtgaatagtgccgcaataaacatacgtgtgcatgtgtctttatagcagcatgatttataatcctttgggtatatacccagtaatgggatggctgggtcaaatggtatttctagttctagatccctgaggaattgccacactgtcttccacaatggttgaaccagtttacattcccaccaacagtgtaaaagtgttcctatttctccacatcctctccagcacctgttgtttcctgactttttaatgattaccattctaactggtgtgagatggtatctcattgtggttttcatttgcatttctctgatggccagtgatgatgagcatttttccatatgtctgttggctgcataaatgtcttcttttgagaagtgtctgttcctatcctttgccccctttttgaagacttaaatgttagacctaagaccataaaaaccctagaagaaaacctagacaataccattcaggacataggcatgggcaaggcattagacttcatgtctaaaacaccaaaagcaatggcaacaaaagccaaaattgacaaatgggatctaattaaactaaagagcttctgcacagcaaaagaaactaccatcagagtgaacaggcaacctacagaatgggagaaaatttttgcaatctattcatctgacaaagagctaatatccagaatctacaaagaactcaaacaaatttacaagaaaaaaacaaccccatcaaaaagtgggcgaaggatatgaacagtttcactttctttaaacagccttccctaatggctcctcacaccaatcccaggcaaggttagttgaagacggaggctcaggagcttataagatgagaaattcttgtaatttaggatgcatcaaaacttactttcaaatagtaattggaaattttggacattgagaaaaataacagttacatgtcataagttcaaagttaaactgtactgttctcaaatggcaataagctcaattctgggagcttatgggaattgctagttataataagttacttaagtggaaatcttctttatgctaagttaatcaggcctgttactaagagaatatgtacttggatattaccagcttaggtatataaataactcttctgccaagtgcataacaaggcacattcaggggtctcatggggttatggccctcagcttgtctctggctgacacagtgtagtttagcaaaagagtcctgggcattattatggaggaccgaggtggagagaagttagaaattagtcagcctcctactggcagatgacttcagaatgtgactaatcattggaccattcagttcttctggtacttttttaaagaaagcctctgattaatggccttgggaactacttttctcctcataacacacttaaagagctcctttcccttctctaggccacaggtgtggacatttaataaattaaagcgttaaacagaatgctcccctggtctcttcctcttatgtccatgaagtctatcaagtaattatctgtaagaatgcagccatgcctggtgcagtgactcatgcctgtaatcccagcactttggaaggccaaggcggatggatcacttgaggccaggagttcgagaccagcctgaccaacatggcaaaaccccgtctctaccaaaaaatacaaaaattagccaggcatggtggtgcgtgcctctagtcccagcttcttgggaagctggggagggagaatcgcttgaacctgggaggaggaggttgcggtgagctgagattgctctactgcactccagcctgggggagagagtaagaccctgtctcaaaaaaaaaaaaaaaaaaaaaaaaaaaaaaaaaattgcagtcagtagcaagggcctaggaatggatttgccaaaagtgggtccctctttagtataattcctgataatgaaataaaaatgtaactgtattgaataaagttgttttcagaggtggtggatttcaagcgaaggttattttatgttgtagtcaaaagggtttaggtagaacttgctctgtaatgatgcctggactaggtaaccaaaagtgttgaaggagtctgcctcaatgggcacaaagtcggtaaacatctgggtgggatgagctctttctttagacaagtcacaagggacactggaatagtttttattcctacttctcttttaagatggagtcctgccctggggaccaaatgtaataatctaatattggtatccccagggtctctgggtcttccctgagaccactggcttcagccaagctagtggtgtctgtttacactacatgagtggttgggctccctacacagagcttaaaagggaagggggttctgtagccaaaatgagaaactagctttcacagccttccttgctcacctccctgtgggccaggtgggatagacactgcaggtaccagtctctgtagggaaacccgtgaaactgagggcctgtggttcagcagatcagcattgcagagcctcccttccagagaggcccaggatggaatagtcttgtggatgaagcttccacagactttgagaagtttcaaaataaaaacagaatatgggatggcaggtaccttcctgctgatgctgtttcaccggctactgccaggtccccagccccatcttagggagggaacaaagcatattccagctctgacttggcctctctttcagattgggagatgcctctgttgcctgtctttttaggaagagcttttgctttcaagaagtataggatggtcattaagaacacacacactggaactagaactggggaagtttcttaacccctctgtatctgttttctcatatacattacagagtttgtgagcattgagtgtgtaaagatatttatagtccttagaacagtttctgacaaacagaagacagcttatggtgatgattgttataattattaaggacagagatgggggaaccttagaaattggtcagccccttaacagcagatgacatcaggatatcaaacagccattggaaaatttaattcctatggcactcttttttagaaaccttggctttttgaatgattttccttctcatcataactacaggatatttagacacatttgtcatctaattccttaattcccatcacataggcagcaggagatctacatttgtacttctatcacacatgtaccatggagtttcagcatatttgttccatacacacctttgatccatttccctggcataagacattctatgacttgagtacatagtggttgtttggaattttgctaatactaggaccttcacatatggcttcacaagttgtgtactgcacaactccagggggctactgagcatttttaagctaatcactacctggtacacactcaatcttaaagatctttgaaatttgaatcaatcaaaaggatatttatacaagatttatatgtagacaggcacatttgaaattgcatccttctaaagataattttatatcattataacttcacaagaaaaaatttgttttcctctgttgatcctagtaatagcaaacacacacagtaatatgactgccatggaatgaaaaattattaagtattgaaaaactgaactgaaagataaaatcttttaatgtgtggattatggaaaaggaggaggcttactttatgcaaggctgatattatataccggtatatattatataccggtatatattggtatatactgatattatactggtatatactgatattatatactggtatatattatataccactaggtacagcaggttatggaaaagtttctcatagttgaagggggagccttttaacaaacagaaaatttctccagtggacttaattgatacctaaatttctacattaaaatttaatcactttcatttatacctatgtcatatattacatgtacataccttgaataggaggatgcatttattctcattagtcatttaccatgtagggcgaataggaggcccacagatgctgataagaaaaggatttcttggagaaagacagagagcactgcagtgagcaccttccatgacctctttcaagtggggagaggggcctgacaaagagaacacggtgagatgctgaaggcaaacactgaccattccaaatttagaaatttagaggatagaacaaatttggaggatagactctagcatcaagatttttgtttagcattaaccaaaagttcaaggacagactagaagtctttgctcaagattttatatttttaggatgttcttagaagttaaataaaaagctccccacttcttgaataagcagagttgatgctgcatgattctttcttgagggcagcaaaatctgcctccatgcctgacccactgtaggcatccaataaatgcctctgggacaaaatatgtttcattttattcaccttattttcaccagaaggtaatgaattatattttgaaacaaattttaggaaactacaagcttcttctttggataaacgggctttccacatcttggcagaccactgctgagtacagtgtcagcatgacttccagccgcgtctcagcctccctcacctactgcgggacttgtccggggctctgttgcataccccgccattgtatacagactcaaccaaaaaccggtattctaaagctcatcatttttgtcatttagagcacttattttctcatttcagaaagtggatgtcaccagcagggctgtgatggaaataatgactaaaacaattgaataccttcaacccaatccaggtaaggcatcatcttatatgtttaaaggatccctcgaggtaacttttagtttctctttgatagacattttaagtttggtgtgtttcttcttttggtgttgcttcctcggtccacttttctgagaggttagcgacttcatggatagcacattttaactggggagaagggctttttaaagctcacattgaagtaactggaagatctgtggtattttatctgactgtggtatatttaacaaataatgtatgcaaacagttcaggtgacacataatatcagagtagctataaactgttatcagtttgaactttcaagagatggtaagaaggaaaattaggatagtttaaggtaagatataatgattcccagaagatgtgaaaaagtagggaggtgaatcgttttcatgaaacacagagggtttcttcatagggcatcaccaaagtcttcagagcgttgatcttgattctgattcttctccaagcacatcacagatcagcattggttcctgctaacttgttatactctaagaaaaagaagtggtaatagagataacggagctatatgttgataagaggaccaggcagagttggggcagtttcggtaggcactaggtatagcaaagcaaagcaaagcaaagcagcctacctgatagacctcctcattaccattcctgtgtgtcagtttctaaccacagggcacggaaacgggaagtgaggctggttgtatttaagtgagatgtgtgaatatttggaataccccttaatcttgaggctagtttctttgcaagtttcaggttggggttccgtgtattttatggtcctagagaggatggtgcagacaactgcttcagccccaatgagtttggatactgagcaatagtggacaagtgatcaaaaaaaaaaaaaaaagggggcgggtgtgggctgagaggaagcaggtgtgtgctgtactaagtgctggctccttttctatgccccctgctgctggctgcagcttccttccatccttattcacctatgaccagcccagctgctattctgaggatgagcagactatgtaggaataactttctggatatttgttgctgttgtttttgttcataaaacacattagaaatgagcttatgtgagggaggaaaatatggaagaaaatgtgataagctataggaaccaggaatttaactgacagtggtctagatacattttcaaatgcttagcaaatttgtcaaagcactgcaaaaatcaggtttcttatttttacccagaaccttcttggtaaccactgtttttcacagagatgcaaagatctcttggatgcacatttattccttactgtttaaaccactgtcataggtcaagttctgaaagagaactgctcgccctgcttccccgcaagaaatcattatataggggcaagaagttttggtctttatctttgcctagaaccttgaagtactccatgatttcctgggattttcacgagttgtacttgtaactcatggttgtagggctaagagaaaggcagtgggaggaggaatatagtatttattgagcactgatgcattttcagtgcagtgctaggtatatgaggcattgtctcatctttaaaagtaaccatttttctccatataaagtaaaaacagttgaagaatttctagtatgaaaatagactaaaaattcattgtaacacaaattatcagtgggagctcatcagttttcctgagtataatggaactgtgctctgttgtaggtaggtgtggtgggttgcattgtgtgtctccccaaattcaggtccatccagaactaaacttataaggaatgtgaccttatgtggaaataatccttgcagatgtaagtagtgatgtaggatcttgagatgaactcttcctagatttagggtggcccctagaaccagtgatgggtgtccttatgagaagaggagaggacacagagaaacacaggaaagaaggccacgtgaagaatgagaagaggttgaagttacacgtcacgagcaaaggaatgccaggagccaccaccacaagctggaagacatgaggaaggattctctcagagcctccagagggaaccaactttgccgacaccttgatttcagacttccggtatgctgaactgtgagggaatcaattcttttctttgaggctgcccagtttgtggtcatttgaaatgacagctctagaaaactaatccagtacgctagcctcattttattcaggaaaaaacaagggtcagagaatttaaggaactttcccattcatacacctaggaagggatgaagacaagattggaactcaggtctgactacctcctaagtctctgcacttcacgttgcacgatcctgcctctgagaagggtaggctccatttcatttaggtgtgaagggtccttccctttcagagagtaccagagaaattcagaaaggaaattgtgggattaaggcttatttttattttaataaaaaacatcaaaggaggaggtaattgagaagatctgaatgtttagaaatgacatttttaatacaatattgcatgtgctaattggctgccaatataatggttttgtgactatttgagagttgaatggacatctgccactaagaacaatgaaggccattacaggcaattcgaggttggtttcagaaaaacagttatgtatgggcaggccacatacatatatgagtaagtactacccagaagagtccagaacaaaacgaaaattttgtgtaatcattccacagaatttaaacaacctgcatttaattgtttacaacaggtacaatttcatccctccaccagcttcttgccctgagagtagacactggccatagagcccagaccaggtaactggtaaagttgagagttaggcagacacccagagagacagtccttgggcacaggagagcacaaagaatgttcccaaactcgtgcagtttgctaaatactttgcccactcagcctttcagtgaaccctagagctgggccaaccagtgtggatactgaatgctggttctgaataagcaagatatggcctgggttaggacagggcctgatgccaagtaacacatttacatggacaggccaggggaatcagtaggatttgatgcttcgagggtactttgggagtacatctgtattagattactgctcccgggtgcttgctggctttcacatcttgggtacatggacaggccaggggaatcagtaggatttgatgcttcgagggtactttgggagtacatctgtattagattactgctcccgggtgcttgctggctttcacatcttgggtacatggacaggccagggcaatcagtaagatttgatgcttcaagggtactttgggagtacatctgtattagattactgctcccgggtgcttgctggctttcacgtcttgggtacatggacaggccaggggaatcagtaggatttgatgcttcgagggtactttgggagtacatctgtattagattactgctcccgggtgcttgctggctttcacatcttgggtacatggacaggccagggcaatcagtaggatttgatgcttcgagggtactttgggagtacatctgtattagattactgctcccgggtgcttgctggctttcacatcttgggtacatggacaggccagggcaatcagtaggatttgatgcttcgagggtactttgggagtacatctgtattagattactgctcccgggtgcttgctggctttcacatcttgggttcatggacaggccaggggaatcagtaggatttgatgcttcgagggtactttgggagtacatctgtattagattactgctcctgggtgcttgctggctttcacgtcttgggggtgtggagcttacacatgttttctattcttaaaactcagttcctattgaagtgatgaccaaagtgattttgtttagcttttaagaatacatggctatgctctgtgaaggtcctacatccactcttgcccatctccagaatgatattttaaaaagcaaatttggtcatattatgtaaaacccttccatggcttttcatgcctttaggattaactttcatttttaacatggcttaaggggccctccctgcatggtcagcctgccctttccccaacaccttgctaggctaacagctccctcgggtccagcgtaaaggtcacttattagccttccttggctccaaccacattaggttcccctgtcactgtccctcttgtaatcccagctgcttttcagtggggcacatgccatacttgtggttttgtttttcatccgccatgagttcagcactgtgcctgtcttattcaccaccacatccccagcccccagctcagttccaggcagccaacaggcactgggatattggaataaatgaattatgaagcacagttgactgtcagtgtctaatgtactaaaacttctctaatacaaaaagtaggaggaaaaattcttccttttccctaaatcatcagatactcatatgtaaccaacatttgtcacatgcatttacttttatgcaaagagcaattctagatgctgtggggcagaaatgagaccaagactggaggcttgtcctctggaacctcacagtcttagtgtaagttacacacagtctgaggagaggagcccagaaggcttcacagctaattcctcctggaaaatccagctaactgatgagatgtggaagtgtgagcgggatcacaggcttaaacgtctgccctgtgagggtgggctttcgagaacgcaggacagacagctgtaaagtcatccaagcttgaactgcaatagcatgaaccagtacacattcctaaaatgcttaaataagatataatttgaatatagaaagtactgtgcacaaattccattctactggttgtaagtgcctattcttacgatatttgtgagcaaaaatcactgaagaagatataactcagttttctttacatattctgatgccttacgggggagcaaaaactgaatcgatgttgtccaatagaaataggatgcaagccacatatgtaattttgaattttctagaaaccacattatacaagtaaagagaaagatgaaattgtctttaataatatattttatttaacccattatagccaaaatattaaccactattaaaaattattgagatattctatgttttttttcatactctggatttcggtctgtattttatacttacagcacatttcaatttggactagccacatttcaggtgctcagcagcccgctgtggccagtggtgcccgtaatagacggtacagcactagatagtttgcctttctgttcgatatatgtttcatgtttacctccttggttttatgttttatcagtgggtttttcttttcaatagagaaatggattcttgatttagaattaggatatatttaggctctggattttttaaaaaaaattctgaaagtctgtttcatgacacttgaatggaattgtagacagttggactgtggaccttttccagacttagcatccttgttatgagagaggccttttcagtttgcactgagaagttactcttaccctgatgtgataatctaatacaaatttccaaactgcttacataaaaagcagcttgaatgtgaaaaatgttgtacacagtaggggtttgtttctctatggaaatgcttttcccttgaatgcctatatggtctagatttttccagcatttctgagatttgggtatcaaattggggtcattcgatgtctatttagaattttttaataatttcaaatctcatttgtgaaatattgcctgtggaaataaaagctagctgtattagtttcaaaatgtaccattagtccctggaaagatactctattaaaattagtgtacttcttttcccacaggctgtgctcttaatcatgtccttccaaagatgaataaatacagtgattatatttggtgactgtggaactgaaaatgaatacatgtattacttggcattcatgtagacaaatccttggtctcacaacacactgaatttactgttttttcctggaggacaggatagcttgtattcatctttgcatcttttagagtccttagcattatgcctggtacattgtttgctctcagtatgtctggtgaataggtgtatgaatgaatatatccatccttcacttaaagaataagggatgtgtgctgagtctagtagccagagcttttccatttccacatcctggcaatgaaaaataatcaaaatgcataaaggacagattacaaaagcagttgtgaggaaaatgttgttaagcttcaaaggaatagggtatttcaaggataaatatattaagaaagaaaacttaagtcaggtgatgggtgatataattcatatactaatgtattgaaaggctggagggtttctacttctacatctttggggaaaatattgaaaataggttcctgaaatatgtgagacactgtaagtgatttagacttttaagtcagctagaactggtggaataatgatattctttacttgtgtgtctaaacaatgaatgctaaagccagatcttgcttaaaagattcttaatcagggctgggcacagtagctcacgcctataatcccagcactttgggaggccgaggtgggcggatcacgagatcaggggatagagaccatcctggctaacacagtgaaactctgtctctactaaaaatacaaaaaagtagctgctgttggtggtgggcacctgtaatcccagctacttgggaggctgaggcaggagaatggcatgaacctgggaggcggagcttgcagtgagccaggatcatgccactgcactgcagcctgggcgacagagcgggactctgtctcaaaaaaaaaaaaaaaaaaaaacaccagattcttaatcataacaaatatagtatacatttaaaatgcatgtgtacatgtatattgagaattaagttaatggcacctcacgtgaatagtccctaaatactataaataaataccatacctaaatcctcagcatggcctttaagatccagcatgtggtggcccctgtgctttctgtctctcctagttccttctccctcttgttcactctgtggcctttagtttcttcaattcctcaagttctttgctgtatcaggagtttgtagcggctgtttccccttctcctggtagaatatgggccctcatctgccccttcttcgacaactgtcttctcaccatccctcctgtctcagcttatgtatctcgactctgagtggtgtcttctgagggccaagtcgaaatcatttctactccagttttatattttcatgctacctttatatcacatgagttcccctcaacaaatctcttgagaagttcctcacttagaataaaattgaaagcacttatgtgggttacaaagtcctgaggatctgagctcattccttatgttcctggctgtctccatctcgctccttctgagctagccttcctcaaacacacaggcactattgttcatggggcctggccagcccctttgcttcaatcacttcctctccatgtcttctcaaagccttcgctggggtctctgctcaaatgtcacctaatttgtgcagctttcctgaccatcttgtttaaaacatcagcccttctaacttcctaagccttttcttgttttacttttcttcagagcatttagcaccacttcagatgtacatttacttgttaaagtgttgcttgtcactgctaccgaaatgcagtgacgcagtgacttgagcacaggattgtttgtacactgcaaagagcccaattctattcttttattgcacttttcataatatttactttatgcaacttatgatttgttcactatactgcctttttccattattactctcctattttacattcttcacatagcagccagttccatccattaaagatgtaattcacatcttgtcactcctctgcttgtaactctccactggcttccattgcactgagaattatcctcagacttgttcctgcctcggggtctttgcacaggtgtttcttctgcctggaacactcttctccagctcctgttaatgtctgctgctcctcatcactccaccttcagtcagatgccgtctccctgtacagtcctttcctgccccgacccctattgaaaatagtttctcctcatccctctcatacctccttatattatttcctatcaacatttggaattatcttctaatttatctttttgtttattgttttcacatcactcccatttctcatatagaacgtaatctccagaagggtagaatcttgtctgtcttatttactattcgtaataatggaagtagtgccctcagtaaatatttattgaatgaatgctgttcatctcttccagtatattgtaaacatagtcattgaagacaaggactatgtctcttttactcctttatatatacccagttcctagcacagagtttggtgctagcgattgattaatttgcttaatgaatgaatcaaatcatgtgaagcatacataagctccatcttacgggagtagctaacttttcaggtaagtgtcgtggtctgcagacttttacagatcagtatcagagctgttctctgtgtaatatctatttggtgtcatgtacaattagtatatttcacaattgctttgggaaaagtgtggatgtgcatactgtcatgtataaaatcactgggctgaagctattaatagacatttgtgtttatatacatagataatagttgtatctatttttgaatgagaaaactgaagctgcaaggtgattagcaatttgcccgaactatacaacagaacagccagaatctttattcagatattactatctccaaggcacattctgttttcaaaaaaaaatgtcttatgctacaaagtcttaaactacaaagatacctccaggcttggtaagtgtggcaagtgtactctagggtgacttgtacaggttcacacccttatataatcccttcccgttgggtgtagatggaacctgtgacttgctgctaaccaataaatatggcaaaggtaatggaatcaactactcaccactcccttgatagtgattacattatatggccaaatcgatggtgcatcactcccatgaccaagtcacattatgtgagacagtcttagcagactaatacgagagacattcccttccttgtctagaagaagcacactgccatgttatgacagcccaaggagaggaccacatgtcaaggaactgggggtagtctctagaacctaagggtggccactggccaacagccagcgggaagccagagctctcaatcacactgccacagagaagtgaacagcccggactcaggaagacagcaacccacgtgagcctggatgcagacttctcccctctctggcctccacatggcaaagcagtctgactctacattgtttgcagcctggcgagaccctgagcataggactcaatttaggcatgcccagacttacttgcagaaactgtgaggtaatgtgtgttgtttgaagccactgagtttgtggtactttgttattctatgtagaaaactaatacagtgtggctgttcccagccagagctcctatttcaagcatacaactgtctgctggggccatcaggctatttgccctgtggctttaggctccttggataccttacattgaagtaggaggtagattgggaacacctgtcactgtcttttcagcttaagatgaggtctcctgaaccccccagggagtataggtcagtccagttccaccaaagactgaagatatctttgtgttttgaaacatgatagcaaagaacacttggcacagtgcctgacacttagtagggactcaagaaatattatgcaccttcctttcctggggtactgcagctcaacctagggcatctcagatgctaacccagcagttcctccctgggcaaggtctttagaaatcccactgcaggacccttcttacaataaggatatattatttaccaccaccctctatttgctctgaaaacctgagaaagcaaaggctgatgatgttagtacactgagggttgtgtatttttcagatttcacaaactgttttatgcccctgagggggacagttgcctgctttgccagggcactctgtgagacctgtgttggcaccttgcagcacccaatcttgaggtgggagatgtttgctgccccatgtcacaagttcttagggctgctgactgtgtactacagcacagggtcttaatatccctccctgctgtttcctacttgaggcataagagagctttgtcaccttggagagaggtgttatataaataccattatttgggttgagagtagcacgatccagtgctagggttgtctatttgtgtaagtcagtaggcaaatcttcctcttcccttttctcagtgtcttctaatagttaactacaaaagaaacaacatagatgtgagtatatttacctaagttctcattacagtataactctttctgtcatttcgtaattgttagtgtgcaaaacagcagagcacattggtatcagtgcagagagcatcagagggccacgtttcagacttgtagatgctctgagacttcacctaagaaaaccaggccataatatgcaataatcacatgttgccaaaatgaaatgcatgctaagatgctatttattacataaattttgttggaagtattaagccccaaatcttatttagtgtgatttgaggatttatactcatcttacaattgtaatctctatattagacttcacaaatttagttaaaataatttagaattaatttttcttatttttcatagtaaaacatgcataacatgaaattatcttaactatttttaagtatacatttcactggtattaaatacattcataatgttgcgtaatcaccaccaccatccatctccataactctttttgtcttgtaaaagtaaaactctatccccattaagtaataactccccctttcctacttcagccgctggctaccaccattctactttctggctctatgattttaattattctaatcacttcatgtaagtggaatcacatagcatttgtcttttttgtgacggctttatttcacttggcataatgtcccaaggtttacttatgtaatagtgtatataagaattgccttcctttttaaggctgaatagtattctgttgtgtgtaaatagtgcaatttttatatagattcacctgttgatagacaactgagttgctttcacattttagctattgtgaataatgcttctatgaccatgagtatacaaatatcactctgaaactctgctttcaattattttgggtagatatccagaaatggaattgctggaacttaagggaattctattttttatttctgaggtaccactgtgctctcttccacagcattttactttctcaccaacagtgcacaagggttcgagttactctacatccttgctaacacttgttattttctgtttttttgatgtttaccatccttatgagtgtgaggtggtatctcattgtagttttgatttgtaatgacctaatgattagtgaagttaaccacctttttatgtgctttttagccatttgtatgtcttctttggggaaatgtcaattcaagccttcgctcatttattaatccagttgtttgggttttttgttgcgttttaggagttctgtacatatcagatatgatttacaaatattttcccccattctgtgggttgcctttttactcagtttctagtgtcttttgatgcacacaatttcttaactttcgtgaagtccaattgtgtaattttttttgttgttgcatatgcctttggtatcatatccaggaattcattgccacatccagtgtcatgaagcttttgcctgtgttttcttctaagagttctagagttttagatcttacagctagctctttaatgtatttggagttaatttttgtatatagtattagaaaaaggtccaaattcatttttttgcatatagatccatttttcccagcaccattggttgaaaagactattatttctcgtgagtggtcttggtacctttgtcaaaaatcatttgaccgtgtatgcaagagtttatttctgggccctctgctctgttcccttggcctacatgtctgtctttatgacagtaccacactgtattaccatagctttgtagtgagttttcaaatcaggaggtgtgagtcttctagctttgtttttttaagattctttttgctatttggagtcccttgagattccatatgaattttagggtgggatttccatttctacaaaaaatgttactgagactttgatagggattgcattgaatctttagattgctttgaataatgttgacatcttaataatattaagtcttcgagttcatgaacatgggatgtatttccatttatatatgtcttttaaaatttctttcagcagtgtttggtagttttcattgttgaagtcttttacctccttggttaaattaattcctgagtattttattctttttgatactattgtaaatggaattaaccttttaatttccttttcagattgttcgttgtcagtgtatagaaatgcaactgatttttgtgtgttgactttgtgtcctgctactttgttgaattcatttattagttctgacagctttttgtgggaaatctttagagatttctatatgtaagatcatgtcatctgaaaatagataattttacttgtttacatccaatttggattcctttttcttaccaaattgccctggccagaactttcagtactgtgttgaatagatgtggtcacagtgggcatcattgtctcgttactgatcttagagtaaaagctttcagtctttcaccatttagtatgatgttcattgtgaggttttcatatatgacttgtaccatgttgaggtaatttcttcctattcctagcttattgtttttatcatgaaaaggtgttgaacttagtcaacacttattcctgcatcaattgagatgatcgtgtgtgtggtttttttttttactctattttgttaatgtgaggtattagatggacccatttttgtatattgaaccatatgcttgtatttcaggaacaaataccacttggtcatggggtataatttttaaaatatgctgttgaatttgctttgctagcattttgttgagaattttcacaacaatgatcgtaagagatattggtctgtagttgtcttgtagtgtctttgtctggctttgctatcaagataatgctgtcctcatagaatgagcaggaaattttccttcttcaattttttggaaaagtttgaggagagttggtgttagttcttcaaatatttggtagaagtcactggtgaagccatcagatcctaggcttgtttttgttgggagatttttgattactgattcaatcttcttactaatgataggtctgttcagattttctatttctttgtgagttagtcttggtaggttttgtgtttctaagagtttgtccatttcatttaggttatacagttcattgttgtgcagttgttcatagtactcttaataatcttatttacttgtgtagatcagaatgaatatccccactttttatttctgattttagtaatttgtgtcttttctctctgtttttttctagttcagctagctaaatgtttgtcaattttgttgatcttttccaagaacaaacttttaattttttccatcaattaaagacatccttggctcttgataggtgatgaaggggcaagtgtatttttagctgttggttgccatttcaacgaaatagccgtcaactgtaattttctccaaaagtgggaaaacagagaaaaaaactaacatttttctgtacttcattttccatctgtaaaatggagaaacaaaacccatctgttgtgttttgcaaggctggatgatgtgtacgcattatatatgtagtagataacttctgaaattatagttataggatgaaatctggttatggtcttcagtttttcaggtatttcagggctctttctaagtttctggaccagatagtagcaattaatgaatactactacaaattattcggcatttgtcctgctcaagatctctgctcctttgggtaatgaggcttggtttctataagacagatagggatgacaaaggaattaggtcactaaaagcagtgaaagacttcagaaaccatgtttcatgtctttggtcttccctgatggatgctaaagccattaggtttcccccaacagtcagaacataaagatgtgacttggagtactgtggccacctgttctgcccaagtgcatcagctgtgttcatcaactcacaccaagggtgggggttggattctcttcttccctgttgtgatagacagatgccctgtcattatgtttttatgtgaaatttcacagtgaaagaaggaagccactcttgagaatacagcaatttaaatcaggttgtaatttttaaaaagtgatttacaaaaggtctttcccaaaatactgccatcataatcatctagggtggggagaaaaatagggtgcggagggcagaatcacccctcatccttgctcttccagcagggaacactcattttcacacccctgtgcctctgcagccccaccctttgttgaggtttgtgctgggcatgtacgttccacagagtctgctggtttccagtgtgacagaaatctcatttgtgataaaccttgattttgaattgtagtaaatgaaactttaaaaaaagcagacattaaaactccctgtttttttccctaggaaaaggagcattccatcttctggcatcactgtccttgggactaaacccccttagaaaacaccgcttttgcctagccctcagaggcttggtcccctgacattttacacttttccagaaaaagaatctcaggggctttcctacaaatgtctgtcacaacctcaacaacctcacaacctcaagtctgtcctattttagagacacacacacaaaaatgctataaaggaagtattaatacttgtttagagagattatcaggaacattgtacttaacagtgagaaatctgaataatgtgtatatgagtgtgttatgttattctttgtactttgcattttcaaaatgtcccatctttttttttttttaagccaagaagtatgataatacttacctggccaccacagatgagaattgaagtgcaataaaacttgccacaagctgggaggaaccagcagtgtgctgctacaggcttaacaaccatctttctggaagaaaaaccttgatttgtagcatgagccagtttctgtgtctcacatggccattttcaagctaccagtgtgacatcactgaactgtgacttggaaaaagaggctcacacttggctcccctgagcagtgctggcctaactccagcacaccactggattgaactgccaagaaagagtagctcccacggatagggaggaagcagatgctctgtaaatacctgtagacagaggcagggagacctttgtagaatggagagtgttagggaccttcctcttctttatttcggaaaatcttagattacatattcgttggttgatctcatgcttgtgtgcttatggaaataaagcatttagtcagtaaaatattgttacccaaggactcaataaccatgcagtcaataaactgtatatatttttagaggcttctttcaaacataactttttaagatgactttattcaaaaagagtaaacccaggtggaatatttataaagataaaagcttcagaaatccatgtgaaatgaaaattatgtaataattggtttgctcacaaatatagtaattcagatagttttaaaaaattactttgatttaaagtttgttaaaataatcaagtttaaaaagaaagtatatgggttgagtgatatccctcccaaattcatttcattttcccccggaacctcagaatttgatctatgtcagctcaggctgccataacaaaatatcataaataatagaaatttattttcttgcagttctggaggttatatagtccaagatcaagttgcttgaccatgttttaatttctgatgagggctctcttcctggctggtagttagacgccttctcactatgtcctcatgtaaccttttcgtggtgcatgtgtgtggagggagagagattgttctctctcttcctctcttataaggttaccaatcctactggattaggactttgacctcctgacttcctttaattacttcctaaaagcactatctcaaaatacaattacattgggtattggggtttcagcatatgaatttggggaggacaaatagcagtcttcttaccttttttacattcatcacttaccaactctattcctttagcgtaggttgggctctcatccctatctttagttttatactagaggcagactagatatttatagccgaacccaccaactctaagaactttcctcttgtccatgacaatctgggagtgccatatttatacatttcagtatacctcttggttaacatacttccataacacaatttaccatactggtcatagcctccattttattgaatagttccataagtgccaggcacggtgctggatactctaaaacatcatttgtaatcctcacaataaacccagcaaggtagctttgattttctccattctgtagatgaagaaatccattcatttttttcagttatcttccacgtttactctaaggcagttctgagccctgggcatgtatgagtgaatgaggcaggcaaagcccctgccctcatggagcctatactctggaaggatgagactgatagagaataatacctaatgtcagatgtgatcagtgcagtgaattaaaatgaagagtaagagggggagagagtgaccgggtccaggaagttctcatgtatatgagaacaataaagtgccatgttggctgggggaggtcagagaggcaagagcagataggaccttgtcaccattgttgggactttgattcctaccctgaatgacgtgggaacacattaaagtgctttggggagaagagtgatgtgatctaaattacactaaataggactgtccttactcttctattgagagtagattatagggggcaagcgtggaagcagggaggccagcaggagcttattttaataatccaggctgtagatggtagtagcttagaccagagtgagaaacagtctgatcctagatgtgttttgaatgtagagctgaccgaatttgctgactaattgcatattaggcaagagagacatcaaagataactatgaagtctagtgcctgagcaagtggaagaatgaatggagttgtattcattaatattgagagtactataggaggagcaggtttgggatgatgatggaaaatctggagtttagtttgaatatgttaagtttgagaggcctacacatcctagtacagtcaagtaggtattagaatgccttagtctgtaatacagtgtaaagggctagcctgcagagatacatgagaatcatcagcttgccaactcaaggaggtgatacaattggccagacctgataagaggtgggacttcagggcccaggcttgcttgcttatatccccaaggccccttggacacatgcttggtggcctaacccactggatagtccaaatcatcaagatagagatggggtccttaaatctatggttttaaaatgttttctgagtaattctgatatgcatcaggttgaccaccactagtaaaagcctttagacaaggattttgttttttggagacttaggggtttccatctgaaactttgagtcccacaggaaatttgacggaatgggaaagagaatgggtttgggagtggctcagacctgagcctgaatccaatcttttcctgttagtaactatgagagctcggataggctttccaggctctctgaggttccatatcctttctttatagatgcagcccatccctctttctgcaaataggagtaattgaaccaaacccacagagttgtgaagattaaggtaaattgtttgtataaagctcctggcttagagtagacaccaattaaaagctaatctcacctgccacatataaaaccactggaagaaaactgttcttgaattttgtttcatcttcatttgggggcaattatcttctgcttctttctgttatctaatggcctagccttcaagatttcagatgttgtcagataagttggttttctttaccccccaccaccatcctttgagcccaagaccgatttgcttggttgtctgctatacaaccacatggatattgttagactttgtgtttctgcagttgaagtacttacacacttccactctaaaatcttctctttgtcctgtgttctttatctcacatttgtatcatcacctcccacgttttcagtctagagacgaacacagtggttctcaaccttggctgcacattagaatcgcctttgggattttaaaaactgccgtgtccagaccacatgccaaaccaattacatcagaatgtttaggagtgaaatttctgaatttgttattgatctgtaacatacaaaaagtacaacacatatatcataagtatattgctcaatgaactattataaacttctgtttaaaggtacatggttcaagaaactgaacattgtcaacatcccaaaacctccttccacagatcctagctgcccttacctttaatactatacatttttatctgtcttgtaactgaaatatgatcatagaacatgtattcttttgatctggcttattttgttcatctttctatttgtcctacttctttcattctcattgctctgtagaattcccttgtgagaacatagcacagtttacttgtccattttctccactgatgagcatttaggtgtttgcattttctagatattttgaatagcacagtttttttttttaattttttttttattatactctaagttttagggtacatgtgcacattgtgcaggttagttacatatgtatacatgtgccatgctggtgcgctgcacccactaacgtgtcatctagcattaggtatatctcccaatgctatccctcccccctcccccgaccccaccatagtccccagagtgtgatattccccttcctgtgtccatgtgatctcattgttcaattcccacctatgagtgagaatatgcggtgtttggttttttgttcttgcgatagtttactgagaatgatggtttccaatttcatccatgtccctacaaaggacatgaactcatcattttttatggctgcatagtattccatggtgtatatgtgccacattttcttaatccagtctatcattgttggacatttgggttggttccaagtctttgctattgtgaatagtgccgcaataaacatacgtgtgcatgtgtctttatagcagcatgatttatagtcctttgggtatatacccagtaatgggatggctgggtcaaatggtatttctagttctagatccctgaggaatcgccacactgacttccacaatggttcaactagtttacagtcccaccaacagtgtaaaagtgttcctatttctccacatcctctccagcacctgttgtttcctgactttttaatgattgccattctaactggtgtgagaggatatctcatagtggttttgatttgcatttctctgatggccagtgatgatgagcattttttcatgtgttttttggctgcataaatgtcttcttttgagaagtgtctgttcatgtccttcgcccactttttgatggggttgtttgtttttttcttgtaaatttgtttgagttcattgtagattctggatattagccctttgtcagatgagtaggttgcgaaaattttctcccatgttgtaggttgcctgttcactctgatggtagtttcttttgctgtgcagaagctcttgagtttaattagatcccatttgtcaattttggcttttgttgccattgctttgtacatgtctgttatgcatgtacacatttctgatggatatacacctagaagtggagttactgggttgcagggtatgtgtctattcagctttagtaaacactaccaaattgttgtccagaattttctaccaatttatcctcctaccagcagtatttgagagttctggttgttccaaactctgaacacttgatctatctctgttttgtatactttactcagattctccaggtacctagaatggcctttcccaggtctctccctttacggttcactctttcagaaagcccagctcgagcatcatctgttcattagccttcccagccttactctttcaggtggaatttgttactgtgtcttctgcagtgtaaatattaatacattacagcctcacccacactctgcctcacagcagtgagtgagcactctgactctccacctggataataagctttttaagagcagaggctgcacctcacttctttcagagtccccctagacatagcacttgcacattataggtgcttcatgaatatttcttttgctcactttatcacagagaaaatcttttaaaaatagatttttggtaaatgactatattcaaccaggcagtgaaacttcacatttcttctgtatagggaatgcataattgtttccagtgtaacctccttattgattttaatcaatttaatcttttttaaactccttggtgtgggactcgtgatttggtgtaggactcatgatttagcttgggaactctctttttcggggaaaataagagccttttttctgattctgtgagagcacgtgatcactttttgtcatcctcacatagagcagattttcatggcataatttaagaaggaagtgcttccaaagagccagattcctaagggaagattggagtgaatgatggtaaaccatatagctttttagcctacctgagaagtggaactgtactcttctgtactttacgaaatggagtcaggagaaatgaaaagactcagtggtagccttggaatccttaacatttaattagtgtgaaggaaaagcaggcctggtgccaaggagacctgctctcaaaccatcctatgagaccacagagtgagtggtgtgatcagattgtatcagcagcctctagtgccattccaaagcacagtgggcggtcatggtacttctgaacaggaaagctttacctaagggtttgaaaaaatgatgtatacagaagcattttataaaaaattaaaatgtttaaatgaagtaattcagtacacagtggggaagagcaaggaaaaactggaagccacaggcacctctgcatctttctgtcaccctctctaacgcacgccagccttcatagtattagggctgctgcttcaacttcacctcccaaatcttgcgcaacctcactttggaccaattctgatttttgtccatggaaacacgcaaggaagggactctgggcagtgcagttctctgtgcaaccaagttgtcagtagagcattccagaacacacacacagacaggggagcctggaaggaggaaagaaagaatattttccccagtatccagtgcctgttgtgttgtctgtgctggtttttgctgtttatcattgaacactgataacagtcttacaaatgagagatttctcagggattcacagctaactagcaagatttatagcctggatttttagctatgtctgtatgtgctcaaagctaatgttcattttaatggactctgctgttttccatggaaagcaagacctagtggttttcctgtttgtttgtttggattaggaaataaaaactaagatttagcagaagtactgagtttacagcatcctcagctagttgccacactagataagtagctgtaggacagaccaggcagtgactcacatggacactgcttttaggtcagaggaaaataactcaggcagggctagcagagcttccattttattctcagcagagcttagatctccctttggctgttcccagaattagaaagctcgtcagggatgctacagattatgctttagagttgggagttaagactgagcctcaactgcccccatttgtcttccttaaaagacagcataaattttaaggtcaaaaaagaaactactcattttagcagaggacaaaacagtggagcccttttgggaataggtcagccttttatggtcatcctaattttgcttcctgctgttttaattcacccaatacatttccttctgggaatcacctagaagtagattcatgggtttgaaggagaggagttaggtatgtttagaagagaagggacacagatctctaagggcacatacaacttggtaaagcaatccaggttgagagtatataataggaatttgagtgctttaaatttgtattttccaggctcactctcagtttcttaaagtactgcttcaaacaatcatttaaagataattatgttaacatttaaagatggttaatttggaggtctgatgatatttttaataacacagaagtttcattaacccaagattcttaatatgtaataaatttgtgaatgaacttaaaagctagtctcttcagatatgtgaattagtaggctttttttaatcatttgaagtagataagctagtagaaaatggctttcttcctccttcttatgaaaatatagaacatatccaagatactcttagtaaaagaataaagctcttcataattgaacaacattcaaaatgatgtgtttgaaaatcagccacagtgtattaaactgtttagaattacttacctggagacagcccttaatagagccaagatataagcacttaccacatccagcttttataaaaggaatgcatccttaaatgtaaaatggcctgaataggatttgtagggattaactcatgtgtggtttcattactctgtttctcctttccttctattcattctgtgtgttttaggtgttgtttattttatttgcactgttttcattttattcgtgctgtcattcttcagtgtccccctagtaccatgatatcagccatgataatatttatcatacttgttgccactgtttatcttactcctcactatattgtgagcaccttgagggctgggactgtgtccttcctggatctcagatatgactcactgcagaaaataatgatattgttcccttaaaaatgattctgtggcattttctctttttaaaaaagagacaggctcttgctgtgtcacccagagtggagtggcaccatcatagctcactaccgcctcaaactcctggccttgagcaatctttccacgtcagcttccctagtaattgagactacaggtgggcaccaccatgccctgctaacttttaaatttttctgtagaaatggggtcttgctatgttgccttgctggtctcaaactcctggcctcaaatgatcctcctgctttgggcaccaaaggtgctgggattataggcataagccaccacacttagcctgcattttctatttttcaaacttaacatatgatcccttttatatgaaaaagcaaataagaaatgaattttatattttttccagtcaccaccagcctttacatgtgctgttagcctaactgctacatactgtttggatctaaacttaaagatacttccctccaggaatcctttgcgatgcccctccccaactgatgaggacagtgccgcatatctgggactctcctcaatcccccatcaaggcacttggcatatttacttcactctaattaattttaaaatagactctaccctcagttcattataaactttgtgaaagcagggaccataattgtcgtgctcattgtaatatccctgggacagggttgcaggatgtgctctcctgataacttttctcatctctattcaatgcctctaagactcaaagtttaaataaaagccttgtgaaataaatgtcaagattgtcagccactgaatgctggaagtaccttaagctgtgattctatctggggtttccattgaagatgggatttggggtatagtcctaggttaatgtgtaatcccaactctaattttgaacctgaggaacctaggtatcctagcatcaattaagtcataggctttaacaatttttttaataaagctgtttttgccactaacactggaattggtttctaggcaacttcttttataaaaacaaaaacaaagaaagagaaattgaaatgttctctttgaggcacaaaactaattttctctagttatgtgctggagaagtgattaagtcttttaaatgaacacagtatttttgctcttcatgggtctgtttaccatcagaatcttagttgagaaatgattttgaaaatagttctgtttcatacatggtataagtgaaacaaggcataaggcccactctgcaggaatttaccattggttccttattttaatccttagactcctagaattgaactataaaactagaataaaatttagagatcatcacataattcgagagtttgtaaaaagctctccatggaagcacccagctccacagagtcactgcaggggccaccacagtgaagggaggatggggaagggcacacagtgatagaatttgagcgtgtaatcctgcttcatccagaacagaattgctgtaattcattttaagatcttaagggaaagggagagtttagtgctttaaaaaagtggttgataagactgactgacggagagaacactggagcgtactgaaggtacacttatcagtagctgagctactttgtaggctgctctgagacctgatcctccatccagccctatttccgcagtgtcacattgcctactctgaaagcttgttctctcttcaccttcagcttccagagctaagctcagcatgatcaacaccatgtcaaaaatccgtggccaggagaaggggccaggctatcctcaggcagaggcgctgctggcagaggccatgctcaaatttggaagagagcttggagatgattgcaactttggtaacaagtgcttcctcacattgtaattctttcatttgtccatggggattttggtgctggtaagaaattctgtagggaatcggtcaaatcattttatattttggttttcagttttagatcctacacacatgggccaaaaatttgttttcagaattatttcatccgctctaatgtgatttatcttacaagttttcttcccaccccccccactataagacctcagtctttacaacagctttggttgacatatccagatgcctccttggcactttctattgggtgtttctggcagtcattgagtattgaagcagagtgagcaggcacagtcagcatgattcaaagccctccctgcctcatggcctttttcatagatctttgctcacttgtatatggtacctagttctactgcccaaggtgagacatgatttattccttcaccctgtctcccccaaaactcagctaccacacccaacatcttctattttcacccccttgtgatgtgggatctccttcctggttgaacccggctatttctggtacttgcttctgctaatagatttgccttaagctagtcccacattagggaaagctggtacttacaagagagggcagggagcttcctaaattgcttcttaaaggaaaaagtaactgttccattcttgatgagaggtatttaccctcttagggggcattgagtctgttgcctggagtgaactgaagatacctattctctcttgtctgttgtctttagaagacaagtggtaatcctttgggttttcatctgtgaagggccctgttattgcgagtgcatttcatctttattctgtaacatgaaagagctttattctctcctaggcccagcacttggtgaggtcggggaggccatgcgggaactgtcggaggtcaaagactctttggacatagaagtgaagcagaacttcattgaccctcttcagaatcttcatgacaaagatcttagggaaattcaagtatgtacaatgagtcttctggaaagtgggcagttgaaatcatacagatgcagatgccttttttctttagaaaacatttttttagcttaccctgtgtgttgtcagctctgggcacgttaattacaaaacaacccagtaagacaaaatgagagaaaccagaaatgtgatacttttcagcctgttatgactgtgccactcatgagggctgtctctggcttctctatgtttgattttcatattgaatagtttttttcagactttttctccagaggataatatacttttcctgagaatacacagttttgttaattattctatggtttgctgggctgatttcacccactaaaatgttagttgtactagttgttagcttaaataaatagttattctatcactgcataagcacatatttttatttttttccaagtctagaaattagatggatgttatgtgtttttatattaatattttcataatggttgttaggattgaggaagaataccaactagccactttctaaaacatgtagagcagttgagctgtttataataaagttcatatgtctttgagtgtggaatgtttgctcacttttttttatctaacaaatatttgttgagcttttttgaaactttgttgggtgtaaaatggattgccataacttgaactagggcctcctcctccttattctagcttaaatctcctttagcagtaccatttgctcaagattatagagttagtaagtgacagactgaccctaaatccaaaatagaactctgactccaatgctgtaccctatagctcaaatgtttaaaaaagaaagttccttccaaatgagcatttagtttttggatcagggcatggactgaggggcgggggatgcagtgtgagggaaggtttagaatattattcttcctcctttccttttcatttttttaactactccctactttgttttcatttcctttcattctgctccatacatactagtaacaagggaaaatccaggattttccttcatccattagtagtgaaagactagctatcggggaaaaacaatactttttagctttggaaaactactttgctacctggtcactagagatgatgggtggagcctgggcagccatctaccaggtatggtgcaaggaggggattgaagctcagcatggagcattagatataatcccttggtaggtcccttccaagtgagattttgttcttgagttcaattatatgtcaagtgggaggcttaaactaaatcactggatttagtttctctggtgacagctgcatcagtcagctggggcaagtgttaagatgtagattcctaggcccccaccctagatatcgattcaagagctcaggaatccatattgtgatgagcaacttacgtgattctaacagactggatgatttgaaaagcaagactgccatttctatctcacttaatttcaaggaaagagtttttcctctggcttctcatgagataccatttctcttgaagacagggcctgtggggcctgtgagtgtgtcctttcattgtgtgtagggcatgtgcattccttctctgtttctgtcatgggctgcaaaggcttagtccagcttggctttggcctgacaaggccagaaaataaagggcactgatatttcctataatttatcttttattcttaattatttttaaagatattcccccatatttagcctttgaaagcactggccccattgatgcatgtttctttatttctctggtggcgttgtattttaaaacttagcctatcttaatttggaagttaatggacgtgatggagaagtgagctcaaataagccttttccataagccctttcaaagcctattcctgcccttgacttttgcagcatcatctaaagaagttggagggtcgacgcctggattttgattataagaagaaacgacaaggcaagattccggatgaagagcttcgtcaagctctagagaaatttgatgagtctaaggaaattgctgagtcaagcatgttcaatctcttggagatggatgtaagtgactcctgtggttttcaatttaatcttatcatcgaggcacaacattaatatgttaaaggccataacccttaaaagcattaatatctgattacactatgtgataagaacttcagtagatagttatttattttaaataattgtcagtcataaagtagactgagaaatagaaaagtttcttctgcattcctgtagtttaactagattctcgactgctaatgaatcttaaagtacagatgctccttaacttatgatggggttaaagtcttgaatatatcatgtaatttatcgaataacgcattaaaagtaaaaaacagaatggttgtaagggtacttgaggtatggtttctactgagcacatatcaattttgcaccatcataaagcctacaaatcgtaaagtcagggaccatctctcttatcaatagtgggaagataaaggatatttctgaggatctatgtataactcaatagaggcctgagaactcagttgtggagcagggggcatcagtagtactggtgcaagtcccagagtccaaaggccagaaagcctagagctgtgacatccaaagacaggagcgtatgggtgtcccttcgctagaagagagagagaacaaacttgcctttcctctgctttttattctatctgggtcctgagctgagtgggtggtctccacccccatagggaagggcagctcttcctttgtttagtctactaagtgaatgccagtctcctctggaaacaccctaacagacacacccagaaataatgctttaccagctatctggggatcccttaatctagtcaagttgtcacctaaaattaaccatcacattgcctacttgccttactcctgactgtggcaggggaagtgtgttgaacatatccagactttcctaccacctggagacagtgtaggtttttgtttatgtaaaacaacttgtgtccacctaactcctcgagaggaatactgtgtgcatgaggggtgctccaaatcacagtgctccttccctgcaacacagcacccctccccatccccaaattcatgggacaacactgcttctgttgacttggaggctgctacccagctggatcataatgtgaaacataaaatcaagagaaatcaagcttagaatattagagcaagaatgaactcaagatgtcacttgatttaacccttttacattacagatgaggctcagagagcacagaagattttctgtcataccatgtcgcctctccgggtacattatgtgagatattgtcacatttttattaacagtaccgatattaacagcatgaaaagtataaggaacaaagagtcctttggccagtgtaccttcttttctatagaataaaagaagtcaaatcccagatacaagattgtagctaagcatgagactctttagagctatatggtcttcctgagggttacccatgttgcttctcctcatggtactgatacgcatgattctaagcataaggatgctttcttttatccttgatggatttgaaacctgcagaactatctatcttagttggcttatcacacagtcatcagcaccaccaaccaggggctgtgtgttgagggcagccctggtgtatgtatgaaacagtagtggctgtttagggatggtaacgtgtaaaactaaggcatgattttcccatcaatctgcagattgaacaagtgagccagctctctgcacttgtgcaagctcagctggagtaccacaagcaggcagtccagatcctgcagcaagtcacggtcagactggaagaaaggtattctacagttccctgcatttcacatttgcattttattgctataaaatgatgtataaagaaatggaaatcatagaatacatttggagacaaacgtctgccaaaattccgcttatcctacagaggcgccttgtggattgttttgattttgttttttcttgtgctttgttttacgttgttctgttgaatctaattttctgcttatgagagatcgatacttggattatattttggctgccacaggtggaacaccaggatgctactgctgataatggatgccatttgctgagcagttattccatgtgggtactggatacatatcatcatcaatcttataacagccctgtaacctaagtgtttttagcctcgactaacagatgagtaaactgaggctaagagaggtgaagtaactagcccagggtcactcagtggtgcaagtggagttcacagccagccataacctgtgtgagaggctgtttcttttcacatcttgtgtttctctgaatggcggtcaagtcctctgccatcagagagagctactttcacctcattagatgtacctcacagcagggctgtagtagtaggaaactaccgtgtgaatgtggctccgtggagttgtggggcacagcctgtttggctatataccagtggccctatgttataatatgtgttattttaatttagccagattaaacaggatgattttgctgaacatgtatacctcaaagggtcacctcagcaagcttttttcttaggccacatggccagattagactctcacagctgatcacatggctgcctgcgtgaagaagacaccaatcatacgattccacacctgttttcgttgttttccctcaggctgatctcatttcagtattttctttgattcatggtttaattgagcattttccttcggcgcagccttatggaaatttatgtaatgctgaagcctccagaaaggttttaaaaccatatacttcaaagatactaaagaaatactatgtgtctttgtaatgtctcttgagcatgaagggagccctttcctttttttcctctgaaatatgttcaaagtcagtatcattctacagttaccataccctaaaccctcgccctcccttgcatatctcttacatactttgtttattgaataactgaaactttggaaaatatttaggggtatgtagaagacaattattagccatacctttccaatttccttttgtcttccctctttcctttcctcctccctatatttcaaactgctcattcttctaagagcacacagtatatttcctccttccctctgtccaaaccttctcatgttctgaatagaatagctccctttcacattttcatctggaaacagctcctgtgtatcttttagttctctccttaaacctcctccagcttccttatggagagatagactccttcccaccttcacccacaaccacacccctgtgttcctgtggcactttgtagatatctctgacagtgcttactaaaatttatagtaatcagttgtttgtgttctgtctcccttacagaccataatctgtttgtgtcttttttaaaattgaaaaaattgtgggtacataggtgtatatatttatgagatacatgaggtgttttgatagaggcatgcaatgcataataatcatatcatggagaatggggtatgcatcccctcaagcatttatcctttgtgtacaagaactgtgttttaattcatttttgtgttcctggtacctagcacagtgcgtatttggataaaggactctgaataaatgagagaggaagtgagggattgagagagagaatgaagacagtgaggacatggccccataaagggacatcaccaaaatctcagacatatacatacaagaaaactaagggtccttttttgatttcccacacttcatcatggtagcatggtgggtgacccaagcatttcctgaatctttatatttgcttttcattttacttcttaactggttacataacctttccaccacttttctttttactgcagaataagacaggcttcatctcagcctagaagggaatatcaacctaaaccacgaatgagcctggagtttccaactggagacagtactcagcccaatgggggtctctcccacacaggcactcccaaaccttcaggtaagagctgaaactgcagatcctattgcatagcccttggcatatccattggcactcttccagaaattttaggaatagtccaatctggctgcataggaaatatgcagtaatacatttcttatggagtcagttgtcaggtagaaactctgttaaaggaatccttttgtctttttttcatttaccttttctttccttccttctcattcttctctataaaactttctttgtatatcccattttctctgtcaatcatcagcacacacgaacacattttgttttgaccctcctttgtggtcgtaaatcgcctttccttgtcagtttggtctgcgagtgtcatcttttctcctgcgtgttcgctctgaatccagcctgtatgacagtgaatgcccctggacagtgtgtccccacatgcattcgcatataacccacagacagcaagcggctccagaaatgtgctgatgagctggatttcttgagtcacagaagcatatggttaaatatatttgtagaagatgatattttgaaactcgacacttgctgggttttccttcccatgcctcacctctgatcactttatcatgctgtggcactggggttgatataataaaagctagatgacattttatctcaggaatatcgatgcataccaaatagagcattctttaccttgtcacacttgctctccactcctacacgcagattacacaacagcctgtgctggagacattttcaacctccacatttgcttgtttgaagtgggaactgtcttatactggatgtggatgttagagataggtagctttcttttatttttcctgtatccccagtgcttgatgttctactgtagaaaactttttataagatgctctcaggagacttattaagaaaaaaagcgaggtctgagccggcaggtggtgctctctgtcctttgcgctcagcacttcagggcatgacataagcagctgtggctcctggagctggccaccaggactagtcacagaaattgtgtatagctatgcttctccctgtctgaaaaccaaccatatatttcacttttcatctggagactcagtaatttgcttctttctctaaataaaaaaataaattacattgtttcctttccagccacctagatggcatgggaactgtgtgcacttgtctgagtctgtatctacatgtgtatgtatgtagtattaatacagcgggtcatttggaatagatccctcttaagatatgatttcatccttcattattttactcaaggtggagtacattatttttgtatgccatagctccagtgcactgcatatatttatgtatgcaacagtttaccttaccaagtataaattacaaaattttttacataatctcatttagtagccacagtagtaatgtgaagtaagtcctactgttacatccaatttcagacagtgaaactgagagcgaagtaccatgtgcaaggtcacagaaagtaaaaacttgaactcagtgttttatattattccgttttcaccacattacagcagttttccagaggctggggttatcattttaaagagtgataaccgaactgttacttaaaagcattctccatgtaattcaccatactttttcagatatgcaaaggttttaaagtgctcagatgagagaattcttgccatgctgtgttattaacctacatcattatattcttcttaagtcattgtccctcctatttctgggcattatcacgaaggcaaactataatgaactgtgttgtatgtatcacaagaatagatgtgactgtttttcatactggaaacagaaacaggaatatgcagcaacttccaaaggtccgagaaagcttctgaggattggtagagggcaagatgcccagtgcagtggacactaaggtccagtagcaagaagaagcttcaacaggaagaggaatgagggaggaaagacggggagcagcaagccaggtgggtacagcaggcagcagattctgtgagttaaataccccttatccttttgtgttcttctcttctctcctgctcttactcccaggtgtccaaatggatcagccctgctgccgagctctgtacgactttgaacctgaaaatgaaggggagttgggatttaaagagggcgatatcatcacactcactaaccaaattgatgagaactggtatgaggggatgctgcatggccattcaggcttcttccccatcaattatgtggaaattctggttgccctgccccattaggatgttatgctggctggctcgcctcctcttgacccagatagttacggttaaccactgctttggcaatgctgcttataacacatcccaagtgcaggccgcagtggtccacgtcatccagccccaccaagtgactttggttgacttgtgggctcccacaggagtcatggtgatggatgatatcctcttagcctggtgggcgtggcatgtgctttttaaaacatcatctgagaccagccagtagtcacagaactgctgtttacacagttctcaggaggctgtggtttcttagaatatgaccatgagccatttcacagaaaaaccatcccaccgaagatattgtctatcaccccaggggccatctgaaggtctctttgcatttctccatgcaaagaggagaaagcttttgctttcacactgtcccttcccaaatatgtgagtcatggaattgtcaaagtaagccttccctcaccagcaaattgtctcctgatctgaatgaatttgtctcttaatgcatccatagaaaagtgttaattgtgggttcaaagcattctctgcaaataggcatctcagctcctcacacttatggctatttctgacgtatagccagttttcttccctccttgctattaaagccagagcggtaattccaaattatttttcagtaagacagttaatcagcattattgtgagagggactgaaaagaaattctccattatgaggaattgggaagaaatctggtatccaagcttaaatttcttgctatacagaaactatgtatgtatttaggctatttctgaagggcacagggaagggggaacaaatatcttcacttcagttttatttgtgaattacatgtttcatgaatccatttggcacagagacacaaggaagaaaacactagtaaccatctttccactagttcatatactgagaaacagtaaatacctttcctttccacttttaccctgtgttctttgaacatcatttgtgcagattctgccctcaatgaggaccaaataaagatgatttttgtgcttagcagtttaaggtatatggctgcatatgcaaaactctttcccaattcagtcgctacttttacttctgccctttctatccatcgtcttcattttgtgtgtacagtgctgtgtgtaagcttatcagtgtgtttttttatttgtatcagtcatgaaagtcctgttaggtatgcagagttctatttatctagctgtacagactctttcagaggtttaacgtgctgcttccgatgtgccacctgcagtagtggatcatgtggagtgaaaggcaaatcttactgcttaatgtataaactctcaccacaggaagcatcgctgtttccaataaatattgctgaagacagaaccaaaggctctgctccttcattttgtgtcagttctttgggtctaacactgggtggatgggggctggtttcagtctccattgctttctcatgcagccaaacaagacctggctccaacttcatatctacctctttacacataggaaaagtttcagcagcaaggaagtagctagcctggacattgggaccttcctggtaaccccaggaaggaggagaatttgggagagaagaaagtaaggagaattaggtctcatagatgttaaatgatatattgttaaaagtggtatcatctgaagaatataatgttaggaaggggaaataaaatatatcccttcgagtagcctcttattttctttcgtaattgaagataaagaaatagacatggaaaaatagtttgatcgaaagtcactattaggccaggtgcagtggctcacacctgtaatcccagcactttgagaggccagtgcaggtggatcaactgaggtcaggagttcgagaccagcctggccaacatggaaaaatctcgtctctgctaaaaatacaaaaatcagctgggcatggtggtgcatgcctgtagtctcagctactcagaagactgaggcacgagaatcacttgaacctgggaggcagaggttgcagtaagccgagatcacgccacagcactccagcctagggtgacagagtaagatgctgcctccaaaaaaaaaaaaaaaaaaaaaaaaaaggccagtattattttctcttgatgtatatgtttggggtgtgagtgggaataggggagcagcaaggcacacaaaatgtgtattttctgagttcccaggaaaataaacatgttctttgtgtattaggggccatttctattattttgtgctgaggccaatagtccagattttctaatctaacatgaatagttgtaattaaatatactaagtttctgttagtccattttcatactgctatgaagaaatacccgagactgggtaatttataaaggaagaggtttaatggactcgcagttccacttggctggggaggcctcacaatcatggtggaaggtgaaggaggaacaaatgtacgtcttatatggtgacaggcaagagagcatgtgcagggaaattgccttttatgaaaccatcagatctcatgagacttattcactatcacgagaacagcatgggaaaacccacccccatgattcaattaccaattacctcccacctggtccctcccacaacatgtggggattatgggaactacaattgaagatgagatttgtgtggagacacagccaaacgatatcaaagttctatatgtgaactagtctaacgtgaaaatatttttttctagctgtatgagttctagagtattacagatcagttctctaaagcaattttaagaaataccaatgatattgtgactatagaaaatcataaagaatccaaagataaactattagaaaaatcagtgaatttaataggatcactagatatgaggaatatacaaaaatctatttctatatatcaatagcaatcagaaaaaatgtaatttaaaaaaatgtcattcacaaaggcatcagaaatcaaaaccagccgggcccggtggctcacgcctgtaatcccagcacttttggaggccgaggcgggtggatcacgaggtcaggagatcgagatcatcctcgctaacacagtgaaaccctatctgtactaaaaatacaaaaaattagccgggtgtggtggcgagtgcctgcagttgcagctactcaggaggctgaggtaggagaatggcctgaacccaggaggcggagcttgcaatgagccaagatcacgccactacactccagcctgggtgacagagcgagactccgtctcaaaaaaaaaaaaaaaaaatcaaaaccatagatacaaatctaacaagattgtacctgatctctgcatagaaaattatggaacatatttgagaaagcaattgaaagatattctgtgtttttagattggaaaactcagtcttgtaaaggtatcattttcctccaaatctagctgtttattaagtgcgatttcaaccagaaatcttaggaagtttgtttccatgtgttcgagaactgacaagttcaacttttaagcctgtcataaaatttttgtggaaaagaaaaaagatgttttttctcaaagaagaacaaagttggaggactctttctagatataaaacattaaaaagttacagtaattaaggtagtatggttttgatacaaagatagcagaatagattgtatatacagaatagcgagtccagaaagagacatagatgcattcgaccatatttgaaggaaaagcattccattatgtttaatgtgatgcactcatatcaactgaacctttttaatatcagttccataaccccaaagtgaaaacagcaagactttgtgccaaatacagtaatctcactatgagtcaatgtcacatgaaacaagtgtcatgaccacagattccaggaagaacttactcttgatttaaggaagagttttggagaccattactaatgcactcaccagatacaggactgtttgaattc

SEQ ID NO: 9 - DNA, 276820 bp, Homo sapien
  conflict (167043)...(167043): Y=C or T
aagctttgctccagactgggagggaggtgtgcaagccccctccaatgaggagacagaggcaagcataagaagatgcgtgctgtgtgcaggtcattgtgtgtggggtgccgtcctggagccgcccccttctgactagcaggagaggaagtcacttgagcccacgggctcaatttcaggcatctagtgcccaacggggctggtcctgtgggtgctccgtcatgtcagggaggggtatcgaggctggggtagagggggtggtagggagggggtgcagactggagagtgctttcatgtgggggtaaaggaatggaggggaccgagatgcccctgggtccctggctgcagggagcctgcagggagaatggagacgccggatgctgagcccaaggggactgggccgaggctggggccaggctggagatggggcagttctgggtgggtgagttggtgaggctctgagatatcttgatgcaggtggctgagggagctgcatttacggtagaatgaacccagcgggtgggcagtcatcagcacaccggctctcacgagcctgtgggaaaggatgagattgcccaggaagcggagggctcagggaccagccctaaggactggccttgggtcagtatgaagagaaaaggcttctcctcctgaggggtggcccagagccagacctgtagagagctgcagaaacactgggcacagggatgatttagttcattttcaaaaacccaacaaactttaaaaaaattaccaaaaggatacaaacatatcttttctttgtttctttctttttttttcttggaaccctcagaggaaggggacaccattttgcagggagcaaaggtaccagttcctccaggacccccactttcagtgtcctgggatttgtgtccagtctcggtgtttctgcagaggaagaaggacccctggaactgttggcaggagcagctaagaaggtcgctcctaccagcgagaggagggacccttctcccttctggaggagaagtgggaagtggggtccccaaggctgtagagatggccggagccccccagccatgcacccagagttttcctcccaccacggtcttcgtcttagggcttcatcatgggcactgtagccctgaagtcccagccagaagcttcggtgtctttaaggcccacatccttgatcccgtgaactgggaagggtcaggctggactggatggaaggacattgccacagagggtgacctaaaggtaatgaagccccagaggccagggatcctggggatctagcaaggcctgggctggggtcaccgatggctttcctcaaaatctaggaagtaaggaagcgtccagacaggcttagaaaaggctttgaacacagatctccataatgtaatagaactgggcccttcactagttacctacaggatttacataaaaagaaaggaattctgcatgctgtacagatggtgtagtataggagtgggacacaaatatagcgtcacatgggaaaaacttcttttgccaggcaggaggatgcctgggactatgcaatactctgatttggaaataaagacagaaggcaatgctgggggcactggggtagacgcgatggttaatccaggtttgtcccagtcatcccttcacccaccgcctgtcagcaactggttcagcaaatgacccagccttggcccacagaccacaggggagacagctgtccttctgggagagggcagtgcacctgtgctttggccatccttctacctggttggggcaaagatgctaggcaggcagcagggcccttggtgctgcggttaagctccgtggccaccacacctgtagacttccgggtgcgtgagctgatgcatttcctcatggtttaagctggctgtcttacttgcagccaggagcatcctgagggacccaaaggcctttcccagatgagggggctggacaaaatggcccccgaccccagacaggggccagacacaggtgaacccagagatttagaccccagctcaagtggcgtcactgcctgacacacccagatagcccctttaaaatttttctctgttctctctgctaggctgagcatatgtgtaagtggacaatcacagataggcattaagctacatccttccctgggccattaatgcttagactgagtctgagtctccatcttgcatctccatgtagaaatgttaactgagccctgatccccaagcctccaaacctcaagcactttgtcttccacttccaggcagaatcgatctcagtggcgaggggatgcctccgtgctgcaatggcagtaaaaacaattgctactgaaacaccacccacgtttcctcttttgctggacacggctccctattaaagtgtgtacatggcgtgggggaggggcacgctcaagaaacaacaagaaccacacttcctagaggccacccagcctccacattctgttcaatcagcattcccttgacatatggctcaccagggccactcccggccagaactccgccagagcatctgatgggaccactgcacccgctgtttgccaacagcaaagttggacagagctgctgtcctcaaggcccctcgacaaggtaactagcccctcatgcttggcccgctctgcacacaggcaccagtgagactaaaagagtccagctcctttcccacagcccctaagagcttgtttgtcattagggagggcactgaaacctcactgcctccatctgcttggcaggttgtgccaagaaaggtgactttgtcaaagggcaggagaccttctcaggggctggtttctgtgcagacattaggagacagcagtggctctcaaatgggctcctgtctttaatgaagtctgtgctgacaaatgtgacctggaagcctgagccagaccagggagcccgaccctcctctcagggcaaggcagggcacccacccactgagagctgtggtgggcaacaaacattcctcctccttagtgtttcttctgccagggatgtggggtgactcgtggcacccaagatgacccggaaaggtcctcacctctttctgcaccacacaactttgggaagattttaagggggttgggtgtgtaaggcccgagctgacgctgacttgtcctcactcctccctacaaacactgggcttctcggtgagggtgacaactccaggttttcagggatcatggtgctgacaatcacgagcaataggcaggtgtagggcaacagggggtggtgaggactgcggtaagctggagagcacagccagacctgaagacattcaggctccagtagaaacgaacgcacgtggcatgtgctcaacaacacatctggcggcgttggcccagtggcccttagtttttgtcgttgggacctagactgaacatgcagaggagcagagagccactggggacttctatgtcccgtattttacctggaagaggaaaagggggaccagagaaagaggcaaacaccagtaaggggggagaggcaagatttgaatcatggaggtttgaagaagtagcaagatttttgttgttgttctttggttgttttttgtttttctgtttgtttctgagtggaggacaaatgatcacgggctgggatgtgtctgcaagtctcctccacctccctgagggtttaactgtgaagttaggtgcatgtgagcctcgttcatccaccaccctggtgggtgacagtgggggcactaaaggaagggccaggcaagggtgctgctccatccccaactcatccctggtggcaggggcacgggtgatgtgggaagaatcagctgcctggggttattcagtgtccaggagacaaattctttcccccaaaaatatcccaaagcaagtatcccaaagtatacaaaataatttagctctgtgaacctgttagaagatgccatcaactcataaagtcagagttactccttttcaggcctcctttcatccttccaatcacatcagaacaacgacctctgtgctagtccatcttaaggcttttgtaacacttactaatcagcttcagccttcggtatctttagcaggtcgaagtatctggaatttgataacatttctcttcttgttgtatttatttttagcaattatctttgatttatggaaacatggtgagatgctggcttttccatttatagtagtgatttaaagtatcctttaaaaaattgaaaaaagttttaggcgctgtgtaaagaaatacccaaccatagacacggcaggaaggtgcagaacatgccccttgaagtaggggcggctgctggttgggtttcactcgtgtttcgaagaggatggaagcgctgacaaccacaggaggaatgcgtcatgggttccaggacagcaactggctggacccaactctgggctgcctagctcccccagccttcacaattcaactcatgccacctcttacaggaagtcctcctggatgcccagctctggagtcatctctgtggtatactaggattccagttccaactttctctggaaccagttgggtcatcacaggtcacgagagcagatgcctacagagagtgaggagaggcgggacctgccacaaactgcaaggtaagtgctcatttaatggttgctaagcaggactgtggggctagcgtggccacatcttccaatatctcaagaaaagttaccaatctaaatttccatgtgacatctcaccatgcctgggagctggatccagcctcgggcacccttaggtgacacagaaagagtacagcttgcaggtgaagatggctgtccagctgcgatgctctcacacccaggacccacaatcgaaagaaccaaggacgtgagatcacagttagagcctgctgtgtaagtcgtgtttcccccaacgactgggacctcctggccagcagggagaggcctgagtcatctccgggtcctctgcccctggccaaagcaaagaccaaagccctggccacacagacctggggcagggcaaatgagaaaatcaaaggggtgggtgttcaccctctggggaagtgaggcagaaattgggggtcccagggcagagatgatcaacagcctgagagggggctctcaggcaggccctggagagaggccgctgagctcagacagcatgggaggatcagggccttgctggagaggagggactggggaggggttccggttggcaacgggctctaacagcaaactggccccagaatgggcccaggtgtccttggatgcttgggtggaaaaggtaggcagagcttggagaggccatttcaggttgggggccgggagtgcaatggcgggaggacagaatgcatacgtggggttgaggacagatgagggcaggagcctgactgtgctcatgggcagagagcccaggtctggcaggaagaggctgtgctgaggctgcagcggagggatgggaaggcagatgggggacaggggacagggacttcagaggaagaggaactggggactgaaggagccttgcctctctccgtaagggcaaaagttgatctttggggtcgcgccctgggtgtaccctcctaacagcatcttctggcctttgcggcctctatttgggcattcggcctggctcagaccttggacccagtagtcagtcccccctcccctttcattccctcaccctgtcctgccccagagcacagagacagggggatgcaccccttgaattccagggctgatgggtgggacccggcaccccaagggctctctaggtggggacgttcggccggcgccgctcctcggaggttgtgcccctggggtggctggcggcggggctcccccggcccggcccgcggcgcttctctgccgccgcctcggggtgtctctgcttcgctgcgagcccggcaccgcggcgacggcggcgcgaagagggaagcgggcggcggcggcggccgcgccaagatgcgccgggtcaccgcaggctgaggcgcccgccgtccccgccctccccctcgctcgcctccctccctcccgcctgcctccctcgctcgctcgctccttccctctccccgccttccctccgcgctcccccgcccgcccctccgcgcctcgcctcctccgccccgcgccctgcggtgctgcagctgcgggcggctccagctgcccccagatgtgggctgggcggctcgcggggaactttcgcgccggctgcgagtgcggggccccggctgcagtccggctgccatggatccgccggcgggagccgctcgccgcctgctctgccccgcgctgctgctgctgctgctgctgctgccgccgccgctcctgccgccgccgccgccgcccgcgaacgccaggctcgccgccgccgccgaccccccaggtaggtgcggcccggcccctactccccgggacccccgccggcctggccctgtcccgcgtgccccgccgccccctccccaggcgtcgtccagcctgacttgggcaaactccgcgcgccccgcccggggccaagttggccaacttcggggccgggttggtcgcgcagggggcgccccgcaccgcccccgagcgccttgggccgggggagcctcggagcactggcggctcctgagtcgcggagggtggggacggagggccgggaaaagccccgcggccaagagcgcagagtcagccccagcgggtccgaggggggagccagggcgaggcggcgccggggctcgcgtccggggacgctccggaggagccggctgccgagcgcgtagccttgggccctaaggattggttggggcgccccgcagggaatccccggagatcggagggaccctgttccacccctcccagtcctcgggcgctcggggagacggggccggcagcgggctgagcgggagctggacaggcaggacaggccgctcgtgctcggggaagccgagactccgccgctccggaggctggcggtgagggcactcgggcggcaggggcccgccgaggggtcgtggcacacgggtaagggggccaacccggaatggcttccgagcagctccacgtcctgccaaggacggtaggtgcaagggtcgggggactctctgacggggtcgtcccttcgggcacggggaggttcccaccgagccccaaccctgaacggggcagggggcagagctcttggcaggcaaggtctccggaggagggaacggctggggagtggcggagccccggagtggtggccctgttaacgccccttcccggttgcaggaaagccggggaggtgcaggctggcttctggggtcgcctggcggaatgccccttcccttcgcagtggggcggggtctgggggggcgtggcttgccggcgggtctctgaggcactggggctccgtggtctccgccgatctaacgccccttcccgttgcaggcgggcccctggggcacggagcggagcgcatcctggcggtgcccgtgcgcactgacgcccagggccgcttggtgtcccacgtggtgtcggcagctacgtccagagcaggggtacgagcccgcagggccgccccggtccggaccccgagcttccccggaggcaacgaggaggagcctggcagtcacctcttctacaatgtcacggtctttggccgagacctgcacctgcggctgcggcccaacgcccgcctcgtggcgcccggggccactatggagtggcagggcgagaagggcaccacccgcgtggagcccctgctcgggagctgtctctacgtcggagacgtggccggcctagccgaagcctcctctgtggcgctcagcaactgcgatgggctggtgagtacgcacttctctagctcctttctctccgctgctctcgcctgggttttggaaaagggttacctgggagtcccttgggagggcaaggcctgcgctgaggactttccgcgcccttcccgtgctttagtgagcctcgtgctccaactgaagggcttggctggaaagcaggttgttttgactggtctgagcagggggccatttatgcatggggagcgcccgggtctccaaaaggctcagcaggcaggagcgtgcgcctctctcttttgcctgcctgaacaggtctctggcttgcatccgggggtgggtccgtgtatgtgtgtgtacctttgtgagtgtgtgcacatgtgttgtggaacgttggtgtgtacctgcatctgggtgcccgtgcacctgtgtgaacatgtgcgtgtgccagtgtctcttgtgcacgtatgtgtctgggtttctgcacatcagtgtgttgagcatctgttgagtttgtgtccgtccttgtgcatactggcgtgatatgtgtgtggtggacttatgggctggcagtcagtcttcctgtttccttgcgtgcgggtaataccagcccagggagctggcagtgatgctgaaatgcccagttagccctctgccccttggctgaccgggaatcattggtttttctgctgtggtttcctgttgaactccagctggttctttgaaaagttggttttctctattttgagctgaggggtgcatttggaaatgaaggctctagtgcccatgagctgctcgatcttttgggggcagcgcctgaaggacaagagagaggctaggggatcccttttgagactgcctgcgcctctctagtcctgtgactggagctctgggaagctctgcttcctggagagggcaggagggaccgtggctcagcacaagggggcctcagaggaagcctggatcgatgctgagggaggaggctgacattggcggtgctctgtccggctgcccggggcctggcacacagcagaggccactgcagttttctattttggattgggtgtgtggtggtcaggctggctgtgctggccagacatctgaagccgcccaccatgggttccgctctaattgctactcagggaactcctgccccgagtgagtggccactctcccagcccccgtggcccctgagcacgcccgtactcgggcagctgaggctcatcctacagtctgcagagccggcaattacaccagggctctgcaaccactgtcattctttctatggagacacagaaaatatcacttgttgctttggaaaatcactgcctttggctggatttagttagaacttggccatattgcaaacaactgtaaatatccctggaggagctgggttaaaatggtgagcccttgacatcgcccactgtctctgaggacatcctgggcctcagaggtgtgtcccattttacgctggaggttaatttcctaaatgaaaggagatgtttgctgcggacttagggtgaggtaaggtggtgggagttgacatggggttgcagtctgttggtgggccaacacctgtgtactatgcattcctgatggagagcattttggggaggacttgtcactgtttcattcattcagcagttcatttggtgattcatttttcagccagcaccttctcatatgtttatcccctgtactggtcagcaatgaggcaggtctggtacccacccagggctcctgtcgtcagggtggctgacggacactctggccaggacttggagagtgtgctcctggggggctgtttgaatgggggctggaagaatgagtggccagctggaaaagacgcaggttggcaacccgggcagagggaggagcgtgtgcagaggtaccaggtgtggattggcctgggcaggacaggcctgctgaagtgtcccatgtaccagacagagctgggaagaatattggggttggaagaggagctgggacctgcctgagcggcattgaatgctgtcactgaataatggccttggacagtgggacagcaccattggttctgttttctttcttttttttttttttttttgagacggagtctcactctattacccaggctggagtgcagtggcgcgatctcagctcactgcaagcgctctgccttccgggttcacgccattctcctgcctcagcctcccaagtagcagggactacaggcgcccgccaccacgtgcagctaatttttttttattttttttaaaatttttagtagagacggtgtttcaccgtgttagccaggatggtctcaatctcctgaccttgtgatctgcctgcctcggcctcctaaagtgctgggattacaggcatgagccactgcgcccagcctcttttcttttcgcttgtcctctttctcttctcttctctttccttccttccttccttcctttttttctttctttctttccttttgatcaggctggtctcaaactcccaacctcaagcgatctgcccatcttggcctcctaaagtgctgggattacaggcctcagccaccgcgcccggcctcttctttccttttctgactttgttgctgcgtatgtgtctgtcctactgttaaatccccctctgctgccaccacgataggcttctttgctaaggacctgggtctttacacagggcacctcttgtcctcacagagccctggtcggggaggcatctcatccctggttacaggtggagcactcaggctctgggaggttgagtgactagacggaagttattcataataatatccacagcgaggggttattcatagtatccacagcaaaatgtccctttgcacaaggcatgagcaaaacaggctgcacagagtggtgttgtgcctcacgttgctgtggaagagttttccagtatctcctgggcagcgtggtaggcgtgctaatttcacgtggtttttacatgcccattaaaaacccagtgagaagccttttggcgtaaaaggtaatgatggtaagtgacagttgactgtgttcctattaacattgtgtgccaggctctcagctgagccccctgtgccacctcgccttgtttaatcctcacagcaccctacggaacatatcccgacatcatcccccttctacagatgaataaactgaggctccaaaagtcgagatagcttgcttcaagcttcgaagccagtatttgaacacaaatctgattccaaggccatgctcactatgttttgttgccttttcctgcatgcctacaaaaagaattttaaaaatgcatttctttacaacatttcccacctttcttatttgactcctggagacgttctcattgtgggtttgaccatcgtcagtgtgagtggagccgggagcaggcctgggagctgagtggccttgactggctcgtgacctgcgctgggctgcagctcctatgggtggcctaagtcctcactggtgggggactgcagctgggacttccgtgggatggaagcaaccctgcccgcctctgcctccccactcagggcagcacggggatcctctcctgccaggctgggcagcagtggatgaagcctccatgggctgggcggtggagatggtccgccctccaaggcctggtccaatcctggggcccaaaggaggaagtgtatgcccttccctggatgcttgatgcgaaccccacaaccctgtgagatagggctgccccactgcgtggctgaggctcagagagacccaaggttgcatggcaagaagaaatccagggctgctgcctttcaggctggggctcccctgcggggctgctgtctgggccaggcacccactctgtcttgctggacattaagagtcataaaggccacagagagaagtcagaagccggcctaagggatcgagatgagtttcatttttcccagcaaggctgctgccttcgaggccacacactgggctccagcaggctcaggtgctagagcagatcaggcaggtgtgagcgggtcctgggactgtgcagtggggtgaggggcacctgagatttgcagctgccgctggtagggtcttccttcctcccaccccaccttggcactgcctggatcgcaatgagaggttgtcaggaagactaaagaggggctgcaggaacctctgggttccctagggtgtcggggctccccaggtaggagcagaggctcctgtgggccccagctgcaagcagcctacacagctgctaaggccagtctcagcctccgccatacttgtcaccttaagacttgctcagtttaagtgacagaaacccctgctcatattggatgaaacaaacaagggacagcatggccccaattatctgggggtcctgaggagtgttggcttcaggcctggctgaatccaggggctcagagcatgctatccatttctcagccctgcctctcagtgttcatttcagaattgctctccacccctcaacccccggcccaccagcggctccaggcccaactcgttttccaaggaggcaacctttgagatggaaagccctcctctctgggtgacacctgtgagagttgggggagggattggaggcccatcttcaaacccatggctgtggtgcgggcctagcccaggtctcctgcccacctttgggactgagggggagggacagactcccaaactctggaatgaagaggggcctatcatacaagaagggaggagaattgtgcagggtggtgaacacggttgtggccacccttctcctggactccagaccccatgttgggcttagaagtcctcctgggctccaggcttgcctgctcggctgcctctggaacccccttccctggatgaccccatactcaagtcacgtggctctccccactctcctccagaccccacccttccaggatcgccctcccctagccagctccaattctagagctctctcagggcccggcttccctccacgcctggtgccaacccctgctttctgctcttgtaccccccactgccccatggtctctccccgacaacccttctccactctgcagccagagggatttttagaaaccatgcagcaactcatgtcacgccttcacttaagacctctcagtggttcttactgctcttaaaaacatccaaacccactggcctggcattcaaggcccccgtgacctggtcagggccctccagctccggcctgagtcgcctgctctgctggtctggaatgagactccgggagaaagggctgcaggaggcagaactccagcgttcccctcaggtgcccctgggagggtggggcaatgactccctcccctgctgccttacgtgagctgagggcccctacagagatgcctgagggatccagcagtgcagcgcagtccctctggaggcggcggccagcctcaggagggggtcgggggagcagcatccacaccatctacctctgcttggggctttgaacccagtccctgcggttttcctgtgagccagccaccgtggccccatttcacaggtaggaaaccgaggctctaggagttacatatgcaggttctctgtgtgggctggcgtctctcctggaatcctttagggaggggcagagtggagccggctcccagcccctcatgaaggccggcatagtcagcactggtctcagccggagcccaccaaggccagctctccctgggagagctgcactccattgtgtggctgggtatgtttctggcactggtaaatgtgcgcggccatgtgctcattcaggtgtggcaggcttctcctgcccaatggctcgccgtggcttccctgtcccccatgtctccagtgcttagcgagtcatgcctgagtgaatgcaggccctcctgcagagtcagctgggaggtgaaggccaggtcctcacccaggcctgctgtgaggctcacaggggcctcacctgggtgagtgagtgaattcaggccctcgtgcagagtcagctgggaggtgaaggccaggtcctcacccaggcctgctgtgaggctcacaggggccacacctgggtgagtaagggaatcagccagggacatccgctcagcagcgaggctggctttgcctcgtggctgcctgagctatggtctgggcctgcccactgtggtatctgaagacccaaagaggcaagtgtgcatggcagccctcctgggaccctgggtctgtgctggcaggcagacatgtccttctttaccccacctgcctctctggcttgggcagccctgggggtccctgtgttgctgccggcacagcaggctggtggctgcatgtggacgtgtgcgtgtcctgggcctgtgcatggcgggagtgtgtgcatgtacgtgttgcctctgcatgtcttgcatgtaggagtacgtgcatgcagtgtgcgtgtgggggtgcatatgtttgtgcacgtctgaatgagtgtgtacacgtgtgtgcacatgagtgtgtctgcatgggagggtgtgcatttgagtgagcatgggccagcatgtgtttatgtatttctcgggaggggtttcctgcactctgtagaagaggggccttaagtggggttgaggtactcaggggagaggaggaccccagccccctcaatcttggcgccacgttagacacccccatcccctactggtggttaccccggaatgggaggatccaggtaggagctgcacactctgctgcgtatgtttcatattaaatatcagctgtccacagggtctgcggtgctgccattaatatggagaagttattaccgagcccggagctggctcctcgggcttgtccatgaatttcaattacactgcacgacgactccagggctgcagagtggggtgcacagcttccgctcagaggcacagggaaccctagtgtccaggaccaaggcctgggtgctgctgaagccaggcaggctctacgccatccccaccctgccttgtgcatttcacgggttaacccagggaaggcaggggcctattgtgggctggaggctgttgcgggtcacatggtccgctgtgctcctcgtgaccggcagggcggacaagcaccacgatcctgagaaccttagttcctccaatagcaaaagatgggttctgtccgcacgcacttcagtggcagtgaaagggtgggtgtgcagcaagcgcctaccccaggcccgggggtgagaaagcggtggccgtgtctgcatatcattagctctaaggtgccatcggttacaggacacaccattactttatacgccaccaagaaagaggagacactcccatttaaactgcaactctgtgccttgtggttccctggaggcgcgggccccactgccacagtgcttggtttctctgatgctgtctgcagcctaatgggtgggccatttctgctgcctggccgtcgcttgtcacggctcccgggaactgagttcggttggcttcgtccgcctccgggggtcttcctcttgtgaattacgaagtagcggtccttcctccagggataggtatttgcctcaccaatgcaaagctacatgcgcctttctgcgtgcaccctaactttttgacctcacagcgtgactcttcaaagacattttgagtgtccagggtgttgacagtgagggactgcgttggaagtgtcgtggcccaggaggcgggggccagggccggggcctgagacccgccgattgcatcctcagttcaggggttgggaaatggaaagatgcgtgttggagggaccagccctcaccagctctgtgcagaatgtccgggattcatctttaaacctgggtatttttcctttgaaagccctaatctgaaatttcaatgtattaaaagtatttccaagtgttaaagcctgtcatctttacacccgggtatttttcctttgaaaacccctaaacgacaaggtttggagagctttgggttggtgaacaggtgaggtgctgggagggtgagtgcccagagagggcgtggaggctctgcagcccttcccgttaccttgccctgcccatccctcccacgcggctgtttgaaagcagggattgggagcacatggaaagtagggtgtcttcacgtttcatgcaaggcttgtctaaggcttgctagtggccattctgattgggacagagcttctggacatatgatgaaaaggggcttgagagctgtgagcatattggtatgtatttacatctgtctattttatgggttatagtacaccatcgccagtcagttgcaaatgaaacctcaggttaagcagtaccgcagatacattctacttttccatctttctgttcttgtaccaatattaagctgtgtttattattagaactgtaaggctctaatagtcaaagtattaagtactttgaagctttgctgtccaatacagtagctataagccacacaaggctattgaagacttaaaatgtgtctggtctgaattgagaggtaccctgagtataaaatatacattggatttcagagacttcgtaccccccaaaaagaatgtggaatgtttaatagatcattttaaagtattgattacaggttgaaatggtaatattttgggcatactgggttaaataaaatatatttctgaaattaatttcacctgtgtcttttttttttaaaaacatggctacatataaagctcgagttctatttctgttggactgtgtggctttggaacatctggctggatacgtccccctttgctggtattctcttacaaaattttcttggctggtcacatatgtttattctttcaaatgaattttataattgttttgtcgggtagaaaaatccctcgtgaatttgattgatagtaaattaaacttagaaactaattaaaggaggaattgacataatttacagtattcatcaggaacatagtatattttttcagcttatttcattctgctttgatgttgtaccatgaagtattatatatacatatttttatacaggtcatccatttttaaaaatcaggattatttcaaggattttttttctttttgccattgctcattgaatactttccatctattggtacacaggaaggctactgatttttatagaactatcttttatcaagcagcttgattgaactcattaattctaatatatctttgtggagtcccttgggttttctaggtatacagttgcactctgtaaacactgataattttggatcctcatctccaatctgcaccgtctggaaccttcagagcgatgttaagtcacagccgtggctacacgcatcctcatctgtgcctggctttaacggcaacgcccccggtatttctctgcttaatacagcgcttgctgtggattaagatggatttcatgtgaaggcaatatcctctgaattctcgttttctaagatcccatttttatcagtaaaggagctgaaatcaagataaaatgtgtcttaactcttaacgctcccttctctcacctccaaaagccagaggtgttgcgattccggggtgtttgtgttctcagcctcggcctcagctgtccactttgctgggccaggaatgaaacccagtccccatttacgcaccatgggaagccctcgtagggaggggcagccttcctgcagaaggtgggggagccagcacctcccggccacgcgggtgacttctggaagaacaggaccctgttcttggaaagccctttgggccatgtgtgggggcatttccactttcatctgtgggttctttcttccctcccagtggcgtctccctccctctgtccagtttctctggagcaatccctccattctcctcctgtgtcttaacagcggactttgcccgctgctctgaggtggtggcactgtctgcagagtctcctgctcttccagtcccactgttatctgttatcccacgtgcttctagaaggtgtttttccaagcaaagacatttccctccttagaagaaatctgtaggcggggcacagtggctcacgcctgtgtaacttgaggaggctgaggcgggcagatcacttgaggtcaggtgtttgagaccagcctggccaatatggtgaaaccccatctccattaaaaatacaaaaattagctgggcatggtggcacacgcctgtagtcccagctacttgggaggctgaggcaggagaatctcttgaacccaggaggcggagcttgcagtgagctgaaattgcgccactgcactccagccaagcagcagagtgagactctgtctaaaaaaaaaaaaaaaaaaaaaaacagaaaaaaaccaaatctgtggcttgtcttgcagaagagcatttccattgtgtgatctctctgcctgcccactgatgggcatgggatttgaggagctttgcacagcatctgtacataggccccatcctgagagattctgctttatcagacctgcgtgagccctggggtctgtacttttcaaaagctacacaggagagtcttttgtacagcatgacgggtgctcactagcgagggctgtggggagtgggggctcacagaccagacttggggcctggctcttctcttgctggcctgtgaccctccattttcccagttaagacaccacctgcctcacaaggtgtgtgtcagtgagggagcagagggggatgaggctggctggcctcagtcaaagggaattccatggggggcttgaggtggaaggaagcgatggccagtgggcatggcccggcttgggatgcgggaagctgccacagcggtgtcggctcctggccctctgctctcgggtctctcacctggaaattcagagccccggcagaaggaaggcagccgccgtcgcatggctatccccaaggccacacagtagggaggggtcctcacaggcaagcgggcaggataagggggtgagggctcccagggcagtagctggcctttgctgcagggctgtccacacttggcggccacctggagctccatgggcgttgagcactgatcctgcagacctgatcagggcaaggtgggggcagtggtaggcatcctccttggtgctcctcagtgccctcccaggcaggtgcccaggccctgggaggctcctggtctcctctccttcccttccttcccctcccttcctctctgcactcctccctcccttcctctcccatcccctccctccctcccctctgccctcccctctctgcacgatggctggccactggccactgatcccagcacactggccctgagctgaggtctgggcttctggggcaatgcaggttgggtcacagactgaggtactgtctgagaccctgtgatagtgggaaattataaatgtatgtttgttcttcatctctggttcctgcctcagagctcctaaaacctttgtaatttcctgagtgttaagggtgatagaaacaccttttattatcagatttggtctgagtccccttgttcctgatataagagtttctggattgttgggttgagaattcagcctcacttccccaacctctggggatgggagtcatggaacttccatgaaaacccctaaatgacaaggtttggagagctttgggttggtgaacaggtggaggttctgggagggtgagtgcccagagagggcgtggaggctctgcagcccttcccgttaccttgccctgcccatccctcccatgcagctgttcctgggttgtgtctttaataatcaactggaaatagtaagtaaaatgcctccctgagttctgtgatctgttctattaatgaacacatgtctgtctgattccaaggtcacagttacttttgcaccaacctaatagcaaattacagaacctgaggagggagttgtgggacccgcccaatttatagccgcctggtcagaggcacaggtggaaagctggaacttgccaccgcaagtggggctgctgtgtgggactgaggccttaacctgagggctaagctgaccccaggtagttggcgtgagcattgcactcaactgtggggcacccagctagcgtctggaggttggagaactggttggtgtgagggaaaccacatgtttggtgtcagaagcattgtgagtgaaaacagatcccagtggacctcacccagcctgggggctctgatagaacaaggggaggtcccagaccagggctcagccctgccgacagggagaaggcctgagtttccagaacagccctaaatgcagctgcagagacaactgtcataggacggttgtgctgggtcctggtgctgggagcccctccctcccttccccctcctctccctcccttccccctcctctccctcccttccccctcctctccctcccttccccctcctctccctcccttccccctcctctccctcccttccccctcctctccctcccttccccctcctctccctcccttccccctcctctccctcccttccccctcctctccctcccttccccctcctctccctcccttccccctcctctccctcccttccccctcctctccctccagcttctcctccccttccctcctctctcttcccccttcttttctcattcctctttttcccactcccctcccttctcttctccctcatctcccctttttcccttttctctccattctccctttatgtcctctcccctccctgccccttctgtcctctccctgttcccacctttctttcccagagtctttcatcagccaggactcctggggacccttcctggctgggggcccttcgtcgtcagctgcactctgcacctgtaccttcctggtacattctgggaaccaacaacgagccatcccaatgtgctgggaggaaatcagggcacagcgatggggatgacccaccccaggtcccacagagcccagagccagctcctttcactgcagctggagcaccagatgaaatctgtacctcctcagaggtacagataactccccacctgtacaagcagggtgaattgctgaaaaggggaattcatgtctcctctccttggcctgctactgagttcttggtgcattttctagcaaacaaggtcaaggctgagtccctgccctgccagagcatcctccacctcagatagggcggcttggcctttgggctgtctttcctgttggggtgcccaggctgtcacgggctgtgtcctcactggggagggtggcccgatgagcagggctgctgggaaggttgtgcaggtggtgtgctgggcaaggtggccaatgaggccagcctttgctccgtctgggagtgaatggagtggaggttggagggtgcccagcgctgggtggagatcacgggcactgggggaggggaaatgtgtgccaggtgtctgcctccacagtcaggttgccagagttgctgcgttcttctctttgcagagcttctgcattctcgggactagggacattaaaaaccaaagccggggcagttgcagggaggctgctggacattgcaggtggccctgattggggcagtctcagctgtggtgactacgctgtggcctttggggccagggatggctggtccaggactgggcatggtatggggtgggtagatgtaggccgtctctgtcttggtgtcagcctgtcctgatagactctgggggctcagagtcctcacagccttcccccaacctgcctgcaggtgcccacctggctccccaaggcctgcaggagtccgctggggctgggctggcctgggacccttggtgggagtcaggcaatcgtgttattgttgaaacttgtttcctttttttttttttttttttttgagacggagtctcgctctgtcgcccaggccggactgcggactgcagtggcgcaatctcggctcactgcaagctccgcttcccgggttcacgccattctcctgcctcagcctcccgagtagctgggactacaggcgcccgccaccgcgcccggctaattttttgtatttttagtagagacggggtttcaccttgttagccaggatggtctcgatctcctgacctcatgatccacccgcctcggcctcccaaagtgctgggattacaggcgtgagccaccacgcccggcctgaaacttgtttctttaatggctggtggttacggcccccaactttcctcctctgaagctgattggttctccctggggctagtcattaaccctctgctagcttgggtgggtttatatttgcagagcttccttttttattctgccgggctggtgttttgtttcttcggtcagctctgtcagcctctctagttgctttcttctggttactcagcctgtagaaaagtatcagcctttcaaagaaatactccattatatgttttgcttttttcctgacttgatttttaaatatgtaactcctttaattcaagtgaaatgtgtttcttatactgtataaggtgttggttttaagtgttcatttttttctaaattgccatgctgttgtctcaacaccattcgtttgctaattcactctttcttcttgactttggaatgtatattccatcatctgtgaagttcatggaggatatggggtttatttctggcctttctgggttttgttttgtttttttttttttttttgagacggagtctcactctgttgcccaggctggagcgcagtggcactatctcggctcactgcaagctctgcctcctgggttcaagcgattctcctgcttcagcctcaagagtagctgggactacaggcgcccgccaccacacccggctaattttttgtatttttagtagagacggggtttcaccgtgttagccaggatggtctccatctcctgacctcgtgatccgccctccttggcctcccaaagtgctgggattgcaggcatgagccactgtgcctggccttttctgtttttcttttgcaccagtccaggggtctttaattgctgttggttgacaatatgttctgacatctgatagggcaagtatcaccatcgtgaggttttaaaaaaatgcctaaagtagtgtcccctttgcagaaggccctcagcaaatctttgctgaacaaatgaacgacatcttcatgatgtttaattttctcacggaaataagaagattgattcagatgtttaaaaacatagcccagtaggtttattactaagagacttagaatgttattgccattgtcaatagggtcttttccattatattttacaccagattgttatctgggaacacttttaatttataatacagtaggtgattatttactcagaatacctgggacctgcttctttcagactaatgatattctcagaatttagacatctttattcccagggagaaaacagagttaaaaatgacacattagtgcaaatcatacatgcatgtgcagagctgccacgaaccacttgatacccatggttgacctggcaagcccaagccccagcattgctgtcctcaaggcgcgcccttcctggcaacagcccctgcttcagatcctttgctcccaatgacctgcatcttcccatgtcttagcaaagcagtctctctgttactagaatggcacaaatatgaaccacagataatcacaaaaagtccttctgaaataaatctcttgccgggtgcggtggctcacgcctgcaatcccagcactttgggaggccgaggcgggtggatcacgaggtcaggaaatcgagaccatcctggctaacacggtgaaaccccgtctctactaaaaatacaaaaaattagccgggcgtggtggtgcgcgcctgtagtcccagctactcgggaggctgaggcaggagaatggcgtgaacccgggaggcggagcctgcagtgagctcagatcgcttgcaccactgcactccagcctgggcgacagagcgagactctgtctcaaaaaacaaaacaaaacaaacctaaatctctcgcttggatgtttcccatgtttgcgttcccagatatatgagtttctctatttattttgcatctagactttttatgaacttccttgttattatttggttcctttttttggatgtttttgggggtgaggattctctacgtgtgcagttactttctgcagttcataatattgtctcttctttttcaacatgttttcgttttatgtctttagtaattttgtgtgggagctacaaccatgccttcagagcatctagccccgcttctaagggaattgagaaccaggtgctgcttcttctgtgaatgctggtggtggtagacccaaagtggacaaaccttggcctgaatggatctcccaggcccatttccccacggtggcacggctttcctttccctgctctcttgcatcaagtagagcttcgaacgcaggatgtgcccatgttgtggttttatggggatgagtggcggcggttgaccttccctttcagtcaaggaggctctctcagtccctcgtggtctgttaggtgtcccctgtggttggggagcagtgcaccgggcatgcacagggttgtttgcaggctggcaggaaaactgcggtctttgaaagatgccctgagtttctacgggggatgtggttcagtgagacactttcaggagaaggctggcgagtagattcggtggtacaacctggagactctatgaatgtggactgaggagccctgttttgagtccctgccttacccttcacaatgagataattttctgcacttcagggttcccattgtgcagggcggagtttgcacactggtgggccacgggccatgtccacccacagatgagttttgtttggcttttccagtgtttgaaaatttctcacaaagctcaagatttccagtttctcttgagaaccaggaaatctgccgggcctatgtgctggagggctagagctgagcaaggatggaaccctctagaagggtcccacagttccaggtgccttgggagtctctgctgctccctatcattaccctggcgggcttcacgcgcattcactccctgtgtaggcacctgagagtttctcttattttgagatgagtgctgcatgggctttggaacggtcatttcttcctcccctctctctccctctccctctccctctccttcccatgacttcagtttttggccatcagcccctgcaaggtcccgtgcgctggagtcagacgcgatctcgctccaacacgtgggcttggttttctgctccctccctccctgggcgagcgagcctcctgtttctcatctgtgaaaggtaaaagctgatgacggtaactactctggtgggttatgatgaggattaaatgaagcgagggccagcactgagcagcgaagggcctgttactacaagatcatattttcctgatggcgctgctaggagggaccacagtgtgaaagcgcttggacacacggagccaggtgcagattttgtcccttttgagagctctgtgggcggggcttgggcgggcatgggagtggggggcggggccgggggcggggcacaggccggggtaggatgctctccctgccccaggcatcaccggcctgggatgtgttgccagtggaggccgttactgttctgaaatggaattcctgggtcagaataagaacagatgtttactggaagaggccaggagccgctgacatcaccgagagcccctcaggacatggctgaggccaagggtcctctagctcttcccgccaatacagcattcctggggcagctgcccggctgggggtggacacacacacacacacacacacacacacgcacacacaaacgccatttctccaccaaatccttcccacctgaaaacaattagtcaaggtgcggaaaagatttccagtctggaatgggagaagagtctcgtggcgggcaggccccaagaagggaaatggaggtcagtgtggcgaggggatgtgcaggacggagaggcagcctttgttgggggagcgctctgatcccttcctccgcacccctcagctgggaggacttggccgcctggccgttctcctttgggagtgaatccggagggtgtggcccagaggcggctggcctcgctcctgtcctcccatccacacctgtgcagctggtgcctgtgcccctgtccctcccacaggccatccccaggtccacactcctgtgactgcaagtgacagaaaaccggggcagaagcggctggggccaaagggggaatgcggggctcagggcggcagcccaggcctcccgcacggtttcagctcagccgccctccccgtgggtcctgcctgggcagtgcaccagccgcccggcagagagaggcccaggttccccgagggtttctgggagagcccagtggtgagttctcactggctcaggttgggtcacatgcttcaggcaaatcactatggccaggacagcggagcaggacttcggctggccaggcctcgtcacaggactgctgtggctccagggctggcgtctgtcctctgaccctctgggagtgggtcggggagaggatgggccccagaggaaagccaggctgatgtgtcaggaggagctatgggtccccattgccttctgtctccaggacatctgccctgtcttctccctgcccccgtttctcccactcccttccagctgcccatgataagcacgcggtctcccttccgtgccccacccgaaatgctccccatggctcctccactttgagggtaaagcacaggcccccagaaccagcattcaaggcccctcctgaccatcatcatttcctgcttgctctacccaccatgtccaccttcccgttcatcctgtgggcctgggacaggagctccgaaagatcacacacacccatcaactgtcaactctgcccacgttggaaacagtgcctgtggcaggtgcaggaggggaccatttgtcttggctgaagttgaatctgaaaatgacctaaggacttgaaggaaccagggcctagtgtgtgtcggggtgtgatcgggtggctgaagaagctgagactccttgggcctcatgggctttgcattagcagagcagacagtgggggggtccctgaggacctctgggcttttgcctgaatgctgggaaccccataggcctggccaacttctcatcacccctcttccagcaaaccttcctgtcttctgtcctggtagttagcacagctgttccatgtcgtgaaccctcctgccagcctggtgaggcccatggacccctgatcaaaataatgtgtttagtgtacactacaaaatacaaaggaaataaatctgattgaaataaagctatcggccaggcatggtgcctcacgcctataatcccagcactttgggaggccaaggcaggaggatggcctgagctcaggagtttgagaccaccctgggcaacatggtgaaaccctgcctctactaaaatacaaggaactagccgggcgtggtggcgggcatctgtagttccaactattcaggaggctgaggcacgagaattgtttgaaccctggaggtggaggttgcagtgagctgagatcgcaccactgcactccagttggggctatagagtgagactctgtctcaaaaaaaaaaaaaaagagaaaaataaagctatcaacatacacatgcttttaaaatttttaatcattattataccttacacatttttgataataatgttattgagacataattcacatactatgtattttaccaacttataacgtaaaattcaatgaatggctttagtatgttcacagaatggtgcaaccatcaccacaattttagatcatgttcaagactctgaaaagaaaccccagaccctttagtaacccccaattaccccgtcctcccaggcctaggcaaccactgacctaccttctgcctgtatagatttgcctgttctgggcatttcattagtataaatgaatcacacaatatttgccctttgtgtctggcttctttcactcagcataatgttttcaaggttcatctaggttgcagcatgcatcagagcttcattactttggatggaaagatatgattccattgcatggatgtaccacagttttttaaatccactcatgggttgatggattgggttgtttccaccctttagctcttgtgaataatgctgccaggaacattcatgtaaaacttttttgtgtgcttttaattgatgcattaaataataagacctaggagtgcatcttacagcctctataatttaagttgtgctgagtgtaaacaccatttggtctggtctgcagcagcggtgctgacagttgccgaagcctgtgatttctgccctgacgggcgcaggtgctgttaagtctggggttgctgcctctctccagagttgaagggaatggcagctttcagttcccagttagtaaagatgaagttgaagtgttctcttttcccagtttatggagcccaggttaagaactctccagggagctcccacagggcagtgacaggtcccaacggcccctggcaagtgctgtggcctgtggcaggaccaggtgtccagatcaagctggcggctgttctgcctgccctcagccatgctgacacctgccacgaagcctggtgtctgcttctttctcctccccaaagtattctctctgtccttagcttgggagtcctacagctggagggtggggggcccaggccctcctggactgctgcccctggggccccattgtctttccttctgccaggccatttcccttcgcagctatttagaagggaaggcagccaaaggcctgtcagaagggggaccacggatggattttccatcagatgtgcagacctgctccctgacactggctggctcggtgcctgcctctcgagggcaccaggcctctgtcacttcctgtgcagcccctgccagccatgagacaggtgagggctccttggttttgtggagactgtcagtcttggctctggagtggcctcagtcctaggcagctcaagttctgcctcccgccagtcctgtctgcaggcaggatccagtcctcacgcacccatgctgggcacggccctgcttccacaccgtgctcaggaggagagcgtccactcccaggagaggacttgccaggcacctctccttagggacacctgcagttaggggtctggcgccagcttgtgtgtgagagattaactccccctggtaccgtcaggccccgagtgagggagccgcagcccagagaggcctctttctgtccagtttgcatcgccacatttgggtttctgtcccgcctggcctgggccccacctgcctgcggagctgccgaggccctcgtctagtgccctcccagaggggccttcagtcctggttcttatattacagaggcagccagaggcttccctgactctgtggctggcgcagccttgacaagtcatctggaattggctcacggcctcctcgcgtctcccggtgtctgatgtggcaatgaagctctatttcagggcctgcgggaggacccagcgtggctcagggtttgtcctcaagggagggcgtggatcagagcctgtagtgcggacctgggtgggggagggagaactggaccctgcactccctcctgtgtgaccatgggcgggttatttcacttctctgcactttcagagtctccaccttgagatggccccgtgaggactgattcaaagaaggcacgggccgtgggtgcatcctctgctcctctccccacctgcgctgggtcccatcagattttggcattcccagcaccggcagtcctggggtgactcacgatggctggcaactttttgtcctgtctttaagttaaaaactgtcgtatgtgccttcatataaaacagaatgcagaaataagccaaaaggagaaaatggaaatccctgcagtgccattagctttcaacatttttgtgtgtctcccacgtccatgcacatatgtgtaaacatacttaatgacaaaagggtcgtattgtaccttccctttgtgatctgcctctgcccatgccacacataatggaaatatttctggatcatccagtgttctgccggaacatctttcaatagaggcagcataatctactcaggaaacatggagaggccgggatctccaggcacttgggtctgtgggcctgggggctgagggagaggctgaggaaaagcactccccagcttttgacttgcacagatgggtggtagagaggaagggtagcttggagagagggtttgtcactggggctgtctcttggaaggagtctggcagctggaaatgcaggtcctaggtgcaggggcaaggtctgggtagaattcgggttgggagcgctctgtatggagggctgtggattccacatcctggggtgggtgggcgggcaccaaaggaagagggaggcagaaggggaaggaagtgctccttggccccccaccatgtgcagacaagtggaggaggcagtggggtcttaggagcggggctgcccacctgctaaaggatgagagaggttcaagaggagggggttcagggaattgggatggcagggggcatcaggcccagcagccaagagggggctttgcagggtcgctggggagttggtggaagctagactgaccaggtgaggggccagtgagaggcaagggagtggagggaagctggtgcgcatggcacacatgctgtggtggggcagacatcagctgcggagggtgtgcagtcttagatgtgagtgcagtgtttacgtgtgcgcttgtgtagatgtgtgtgtggccctgcctcgagcacagaggattttaggtggcttgagtttgctcagggaccgaggatgaggatccgggagatggagagtttgaagctatagaagagagagtgtattagtcaggtgttattcctcaagtgttggaaatccaagtaaaagtggcttcagaaaaaagaaaaaaaaacttattggttaatctgcaaaaagaaaaatatctagaactatctagcttcaggtgtggctggatccaggtgcccaaataaattttcagttgttttttttcccacatccccaacccttggctttgctctcctctatgtcgatttcactctcaggcctgctcttctctgaggcagaaaaatggatgcaggcagctgctgcattacctcctcacagggcaacaacccgggggaaacagcttttcctttccaacaattccagcaatagttcctggatttaacttcatggaataccttgtggcaagtcctcatccctgagctatgttcatgtagtcagatgacaacgtattctacctggcctaggctgggtcatgtgccctccttgcccactggtgacgcagggatgagagctggttcctgagtgacacaggggctgtgctatcagaaggagaagggtgggccagaaacagtggctcatgcctgtaatcccagcactttgggaggctgaggtggacggatcacaaggtcaggagattgagaccatcctggctaaaatggtgaaacctcgtctctactaaaaatacaaaaaaaaaaaaaaaaaattagccaggcgtagtggtggacacctgtagtctcagctactcaggaggctgaggcaggaaaatggtgtgaacccaggaggtggagctcgcagtgagtcaagatcgtgccactgcactccagcctgagtgacagagcgagactccgtctcaaaaaaaacccaaaaaaatggaggagggtggactccaggcaggcttagggttcccaaggaagtggctggggccaggattgggagacctggaaggctggaggagggagctgctgcccaggagcacagcaggagagagaaggacacgaggcagacatggagcgggagggaatttcctccgtggcctcccttccctcaccaggcagggcagggacagtgaggctgctgaccagcctctacagctctcctgggagtcggctggctctgcaaggcaaacagaaggctggggaggttgactgatcaccggctgctccgggagccgtcaggctgggcagcaggagtggcctgaatgcagagaagcaagccttgagatcaggcagggcagtcttcctacattaggagtctgggaccaggcattctgtgggccaggccggagatgtggcaggctgggtgtgaacgtgctgaccagtggggacctgggtttgggtgctggggagccaggcgtaatgactgcgggggctggtgaaggctgagtccagtctgcacgcatgcttcctgtggtttctgggtgaaaagagggtcacagctttttgcctcaacagaggggagaggcttctattctactggttgagtgtggatggggagggctgggaggggtaggatgaggtggtagagacatacaataagcaaaaggccaaataaacaccttctcaggtagtggcaggaactgggaaagtaagcaagcaggcagtgaggctgggagcagcaggagggtgtgagtgagtgcatgtgtgtggctgatgtgtgagcacgtcagtgatgcatgtgtgcaaatgtgaggcatgtgtgagtgcatgagtgtcatgcatgtgtgcacatgtgcgggcgtgtgcatgtataatgcatgtgcttgatgcatgcatgtgtgcactgcatgcctgtacatatgatacctgcatatgatacacatgtatgaccgatgcacatgtgtatgtgtgggtaatgtctgccatgcacatgcatggggcatttttctggtgcatgtgtgtacttgtgtgtagtgcacatgtgtggacatgtgtatgtgatgcatgtgtcacaggagatgcacatatgagtgatgtgtgtgtgcatgcgtctgcatggtgcctgtgtgacgcctgcgtgtgagtgcacacgtggtgcatgtgatgcgtatggacatttgtatgtgggtgcatgcatgctgcatgtgggagtgcatgagtgcacatgcatgtgtgtgggggcctgtgtgttgagggaatagctgttgggaaccctcagtcataacagggctgtgtgaaatcttcagctggaggaagacaggagagaaatagcgtgcagctgtgttcctaatggcacacacgccccttgcccagagtgcatggtggaagagggctttctggcccagggaccagctctctttgtggcccaggcctgctgcttttgggctggggtctgaccttcctggaagacccttcggggccccgcctctcagaggccaggccccaacgtctcaacgctcaaacagcgacatcagtgtttcccccaggggagtcatcctggggaggctcagctccatcctgagccgagggggccttggcattgccccacctgccctggtctgagaaggagctgtcctctgcctctctgtggtctcatggggacaaatgccagccactggacagtggcccttgtcgtcttctaactgtcaagattccaaaaagacggaggcgaggggtgtgcgggagcaccctctgcgtgtgcttggcttcttccccaccagccttcttgtgagagggctagaagcagctgtcccactttgcagtgggccctgtccctcctggcagggcagctgtggccgtccctggctgtccccgccccgcccggcatctccttctctccccatcccctgtctagctggccccgcctctcctccctgtcttgctttagtctcatgcctttttaatgagggctcagcctcctgtgtgctgaggctcagcggcagcgcatttaattaatactctcgcatcgcagttcttcagagtaaatgctgccattttattcctcactaattggaaggggctagttaagctctgagataaatgaccctttctgctgggagtgtctcagctcagagtctccatgagagtggctggagccttggatgggaagggcaggagggctggcctgctgtgttcctcctggtccaaggggggcctctttgctaatggccagggtagagacgtggccagggtgaagcctgcctgacctttggggaggacgtgcaggtggaggctctgctgaccagcagggcttcagattcatcactgcccgttcctcatgtcctggctccaccccagccctggatgagccccagggaccccagggaaccttcagtctgggtttccagaacctttccctggcccagtctacacctgcctccctccctcactgtggaccagccccacctctaccctccatcctgtacgtctgctccactctccccaactggcgatgagtctggccagggagtctcagctggtgctggcacgctaacctcccctagacgcgtgctgaaatgtacacgtgtgtgtgtgggtgatgtatgcgatgcacatgtgggggcgtttgtgtggggcatgtgtccctcagcacacatatgctctgtgcccgctggccatccgggggacatagattacaccaacactgcagtgctgctggccacccatggtctgggcagcaggaagaggtgcaggagtccccacacagtgtcgctgggatggcctctgggtccgtgcttatagaagtctcatgagtgcaccctccgcccacctgctcgcatctctctccctccacgaggaactgtgctgtggcctcctgggtcttcaagctcctttcctgttgtgttggtgacaggaatcggggtcagaagggcagcgtccgagcaggcttggatgagatgtgtgatattgtgttaccatatcagcgactctgctagctgagtccatcttcagggacaaggatagctgtagccagacctacgcatggatttatgaggaactaccaagaaaccactgggaggaaagacgccaaagtgctgaggaaaaggatgctcagaggtggccctgctgccagctggcagagtgacaggagggctggaggctgtggggacccaggccacgtggggttggggctctgggctttgtccttgtgttcctgtaattgtctgttgctgagaattagctggaatttctttctttccttcttttgttctttccctatcctttccttcctttcctctcttctttccatcctttctcaccactgtgtattctttttaaaaaattaaatatatttcctttttttgagacagggtcttgctctctcccgggctagaaggcagtggtgcaatcgtagctccctgcaaccttgacctcctggttcatgggatcctcctgcctcagcctccaaagtagctgaaagtacaggtgtgcaccaccatgcctggctaattttttaaatttattttttgtagagatggggtctcactatgttgcccaggctgatcttgaacttctggacttaagcggttcttggcctcccaaagtgctggaattataggtgtacaccactgcgtcccgtccccacttcatgttcgacagcagttctccgtgcctgctctgccctgggccttgctggactggggttgaagaggcagccttctgttctcttggagctcacaggttcctggagggacacagcaggaaggtctcaaatgccatccctgggagtggggagggtgttctgtggggctggggagccctagggggcctaggcaggagcctgggatgcccacatgcaatgaccccctgagctgtggccgactccccagccctgctcctgagggccctgctgctctcagcatctcccagggtgtcacccttctgggttgctagatctctgctgctctggtgtggcctctgtccctgccgacccctctgagggacacagctgtcctctgctgcggtggctctggcctcggaatggggcagcctcttccctccaggcaagagcctttgaattctttgccagcaggacttcctgggctcttgtctcccgtctgctgcccggtgcccacgccccagtctgggacttggatgtctgcctgctgcctccctgtttacactgatctgatctgctctttccctctgggagcttttgaactttctctttgtctttgatgttcttaggtttcattatcgtgggtctagctatggagctttttcttatatatgtattgataaggcctctaggaacccatccatgctggaatctttcatgtaattttgttttttgaaatattccttctctcacctccccgactctcttctgggacttgcccacgtctcgcagcttttctccctgccctctgtctcttgctcctttcttagcacacagcgagagctctgtccagatcccccagttctgcggtggctgtggctgttcagttcctctgttctgctcttcggtgcagccaccaagccctctctccagtggcgtttgtgctcagcagctcctgggggcggccagttcctgtggccatctggggctgtgctttgtctctggaaggatcgttgtttcagttttcctctgcgtgccatgggcggtcctgggtacggcctctctagaacatagtacctgcgccactcagatcccagctcgtgtccccggaggtggagactgtggctggtggtgctaggagggctcatgccagcttctagctctggcttctcctcgtgagcgggacaagggagatgggaggaaagtccccagagatggcttccctcccacccaagctctgtttcctgacctgggatcctggctcccaatggtgggaaacaaaccccctttggggacacccccacttcactggcaggagtgcagtcagccctgggatcccgacatgaccttcccaaagcactgtggcctcagtgctttccagaagccaactgtggcctcagtgctttccagaagccaactgtggcctcagtgctttccagaagccaactgtggcctcagtgctttccagaagccagggtatttaatcttgtccatggcgacgtggacgcgtgtcttgggaggagccctctggggtggggcagaggctgtgttaggtgggagggtctgaggcagggacccaggaggaacagaagagagagagtgagtgaggcctgctccatgcaggggcagggggaggaggaggccggggtggggccttggggattgtggggggggtgggtgtaggaatccagtaccacttccaggttccttccaggcttgaataactgggagaagggggcgtagctggctgtgattaggctctgggaggggagtcgcttaatgtcaggaaagagagttacttctaggtaggccctgggcttgaggctcccgggccatgctaagggacattcctatgtcccttgcagctcttggttgggcctggcacaaaaaagtgtgtgcccaagactcctgtctgtaggtggaggtctgctggagtagaggttgggggcactggcgggggacaggagccccacctgggtgcaggaaggctacaagggcttggtggaagagcgtggaagcccccagaatcaggggcttgtaattctggcccgtcaccctgtgggacaagcacatgggcctctgcatgctgtctcacctcatctgtaaaagggagacagtccagtgaggatgtgggcccgtgagagagagacacggcccggggggctgcagaggcaggagcgctgtgggtgggagggctgcttcctgggctctgagtacagcacggtgcatttactactcttgtctcaaaaagcagggaaaactgagtattccggccacgccacgccacgccacggggtggggaggagcctggccttgccgctccctgcactctcctctgcgctcacttagctcagagctggcggccgcccagctcccagtgagacgtggcagccaggaggctgaggcccagccaagccccagatggctggcgagaggtgcttcccccgagctgagcaagacaaggacagggccgacccggtgggaggggcaggatgggaccaggagcccgggaaatgccagtcctggccctggccctggccggtctgtgtgctcccaggctgcgcccaatccgaagcctccgtgtggatgcagagcccgaagctggaggtctgggcataggcaggggtgtggggtgtgtgaggaaccccccgccccaccatcaggttctgcctgggaactcctggtcctggagctgacacccctgctccggccaggccctcctctgtctcggtgtgagtgtgtgtgtgcacgagtgtgaatgcgtgtgcgtcccctctgctgacacccctgctccggccaggccctcctctgtctcggtgtgagtgtgtgtgtgcacgagtgtgaatgcgtgtgcgtcccctctgctgacacccctgctccggccaggccctcctctgtctcggtgtgagtgtgtgtgtgcatgagtgtgaatgcgtgtgcgtcccctctgctgacacccctgctccggccaggccctcctctgtctcggtgtgagtgtgtgtgtgcacgagtgtgaatgcgtgtgcgtcccctctgcggacacccctgctccggccaggccctcctctgtctcggtgtgagtgtgtgtgtgcatgagtgtgaatgcgtgtgcgtcccctctgctgacacccctgctctggccaggccctcctctgtctcgatgtgagtgtgtgtgtgcatgagtgtgaatgcgtgtgcgtcccctctgctgacacccctgctctggccaggccctcctctgtctcggtgtgagtgtgtgcatgagtgtgaatgcgtgtgcgtcccctctgctgacacccctgctctggccaggccctcctctgtctcggtgtgtgtgtgtgcatgagtgtgaatgcgtgtgcgtcccctcttcacaggccactcctgaggagggagccccggtaaggctttaggctgctggctggttctggggttgccatgaagtcctgaaatgctattctattgctgtttcttgatgtatcgggtttcgatgttgtccattgacttcctgccctggaagaggagggtttagctcactgacaacactgctgcccctcccagccccattcttctaccataattctctcaccacttttagtccatatcagagttccccattgtattggtttctgaggctgcctgcaaattactacaagcttgctggtttgaaacattagaattgtatcctctcacggttctggaggctgaaatcagtttcaacagggcaaaacgcaggtggcggcagggccgcgctccctccggagcctctaggggaggatgcgtcctgggctcttccaggtcctcgtggcagccagcagtgcttggcttgtggcctcttcgctctgggcttcagggccgacatcctccatctccctctgctctgcctgtacgtggccttctcctctgcctggctcatcttgctctgccttcctctgataaagagaagtgtgattgcatttagggcctgtcttagtccatgcaggctgctatagccaaataccataaacggagcggcttaaaagcatcggaagcttatttctcacggttctggaagctgtgcatatggttgtggtgagggtctgctccctggttcaagaaggcatcttgttgcatcctcacatgctgaaagggtgagggagctctctggggtccctctgatcggggcacaaatcccattcgtgtggatggaatctggtgacataatcacctcccaaaggccccacttcctaatatatcaccttgggggagtagctttcaacatcggaatttggggggaatataaacattctgtctatccctgggcccacccggaaaatccagcagtcactccatctcaggatccttggactcaccgcatctacaaagttcttttttgccatggaaggtaacatttatgggttccagggattgggacccggacgtgtcttcgggggccatttttcagctgaccactgccatggtcgtctgactgttatatttgcacctctgcagcttctaacattagcctggggcagagggtctagagtatgcccttagcggcacagggttcccatgccccttctccctcctccccactgctgtcatttctaccttcccttcagcaaggcagagtgttgttaaatgaaaaatgattcaatgatacttattaaagcgcggtaaggcggactttattcaggaccatggagatagacacaggaaccgctagagtgggctcttgcagtcggggagagagactgggctcaactccgaatacagcacgggcgagtggggggtgatagccaaggagcagggtaggggccaggggatggggaattactaagagcaacatcaggggtcggggattctagctaaactcacctaacatgattctagctgaagacaggctggggtgaccagacatcaccagaggggtgatggggaggacgagcctgaccagatatcaagggtgatcagatatggagagatggggcattcgtgacttagcagagttcttgataaactggatcttacaaggaagtgggcgaaggagaaggttcaggagctggactaaagtttggtcaagcaggagagtccctgtcagtgtccactgttcaggtcctttgttgtcattgaggctttgctggcaggtggatgtccctgtgattcttggcatgctgctcaccactgtctgaccctggcccattgctgtgcctctgagccaggcggcgcctgcccatgggctagagagagcagagtggaggggcatgaccctgcacaggacagagctggacgaggcccttccagagaagtggccagccagaggccagctccacctgggccaggagcgccaggccctgggggagagggatggggacgtggccttcctgttcagagggcgggggaggctcggcctcagagtgaacatctgctgaacatacgcatcctccccttatataatgctgtctggaaaaatggtttcctgttgttgttgagataggagtcaacgggccctgcactcggtgggttggggggtggggggctggggagtggagagggtggtctttggctccaacctggggtggaaaggggcggaggtccagaggacccagccggcaagtgggttggggcaggcaggggcaggtggggttgggcaccctgctgagctgctgtcctgggccatgcctccctgacccctgcagtttggccatggtctggggtggtggccctttcactgtccccaggaggactaaggccctgatgcctctgcgtccccagggcagggcagtagggcctctacacccacctttgagggaccctgggagggtctagagcagtgtgtcccagacttcaatgtcatcagaccacctgggaacttgccaaaatgcaggttttagttcagctggtctggatggggcctggattcagcatctctaacaagctcccgggggcccccaggctgctccaggccacattttgcatagccaggctctgcaccaccatccctcaccccagccgggattctagcaccggtgggtggcccagagacgccaatcagattcttctgtggacttgaacctctccttgttcctggaaatcctgagatatttaatgaccaggggagccctctggggctctctaggccatactgtaccctgcaaggcagcctatgggggggcttcggaaaggcttgtagatgcctcctgatcctccagcttggagctggggggctgagcccccaaagacaacaagaccagttctctgtctttcttcactgtgtttctgccttgtggtatgagcaaggcatgcctagatccctgcccgctgggagctgcagcctggtgggggaggagggccgtccacaggcccccacagcagacagcagagcatctcagcgcctgagcgctgtggggacatgggacgtgcagggagccctgggcaggcgtagtccggggtggtctctcctggagggtcctgggtgacaggaaggagcagtcaaggcatcaacctgggcagatccacaggacattcaggggcacccttgtctgtccccagggccgcaggctactcccaaggcctccctgacttgaaccccagaagccagagggcaggggtggggcagggaggacaggagggacatgcagtgggggcctgctgggtccagggtcctgccctgccctgaggcaaacccagggtgttttgccctcagagctcctcccctatgcattttaaatagaagaaactgaggcacggagaggtgacccacccggtcaagtggcagggccagagcctttttttttttttttttttttttttttggagactgagtcttgctgtgttgcccaggctggagtacaatggcatgatctcggctcactgcaactccgcctcccaggttcaagcgattctcctgccttagcctcctgagtagctggggttaccggtgcgtgccaccatgcgtggctattttttttgtatttttagtacagacagggtttcaccatgttagccacgatggtctctatttcctgacctcgtgacccgccccaccttggcctcccaaagtgctgggattacagtcagccccagctttctgcagtgtctggagggaccaggcttcaggcttgggggccgggctaggaagctgtgcacagttagagttgaaggtcaggtctgggtcactgttgccaggggagcaggtgtctgcagacatctgactgggatggctttggggggacatcctgtgacctgggtcccgaagaggtggcctttctccagctctatccaccaatggccccaggcctgtggccactgaaggcagaagcagtgggactgggtctgccccagtgggtgcctggctgaagtctccctgcacaacccttgggaggcatgctggctcctaactggcctctacccggggaacacagagttttcaactgaattggtgtttgcgcctctctgctgagctggcccatctctccatgtagcttcctgtggatggcgcagctgcagaactccagtccacagtcaggaggcacggggctgccagggcagcggaagagacccaagggcaggaacgcccgcctcagccctcttcgtatctttccctggacccagggcctcaccatggcctggcctgtcctcctagaagaatggctgaatgaatgggcagctgagggggatgctaaaggcagggaacagtaccccgagggcttcagtggctgtctggctcccagctggcctagctgcatcccagggcccctggggtgggaaggaagaggaggcagaggggccaggaacctgcaggagggtggggttccatggcagcccgcgccctgcttccactcaggacgccagccagattcatctgctgggacaccaccttaggaaggaggcacttctctgagaggccttgggaatttcccccaatccacatacacatgggcatcatgttgggagaaactgttttgcaaatacaattaaaaaggatcctcccaaagttttgcctagaaaaaaaaaatgaggctgtctattatgggggcctgcaggcatggtcatcgcattgcaggagctcctgtgggctctggtgcccctgcacccttgctcgtgaacagtggcggctgcccgttcctgtcctcagcctgcccaggggctgcgcggctccccttccagctggcgtgcgtgacctttccagctggcatttcgagtgctctctctgggcaccgctgagctccacggatccccaaggcggtcatttgtcagatggtcctggtgactcccgacatcccatcagcgtctcctgctgctaagacaattgtgtcagacaactctcagcgcctgtcttcccacctccaccgagcagcctgaatgctttactaactggggagaaatcagagcaccggatcctccacttaaacccctgttttctccttgttgtcgctccagaaggcggcaaacttggcccactctgcaccacagggaccttggcaaggaaaccttacaccatcccgaagtaggggaagggagcctcgggagggccggcgacctcccgtactcaactccatgcctgtgagatgccaggcactggtctggtgacgtggacccagcaaggacaactttgctctcgtaagatccctggtcagggggcagagagtgacccaataaagaacccacgtgtcgatgattgggaaatggtgttacaaaaaaataggacaggatggcagtgtggagtgtgatggagaagggacacccttcaccaaggtccttgtgaggaggcatcggagctaggacctggacttctggaagaaggccattccaggtggaggcagcagcaggtgcaaaggccctgaggcaggtgctgagttgaagtgtgccaaggacacagaggagatctccacggctggcacttgagtgaaggagaaatcagcggggaccggggcagtcatgtggtgggaagccgctggagggctttgggcaggcagtgacaggtctgagtcgtgtttcagagattctgtggggcagccgtgaggagcatagagaatgaggtcacaggcttgggacgcccgggctcccagcctggcatacgtgatggtgctattagtggatggtgcagcatgacccgggaagcccctgcgtggtggtgccccccggaccgggctgttgaatgctcatgggcagagctgcttctgtgtcatggagctgtcctggagtgctgagcagtggccacccagggttggccgggtgctcgagccctgagagggccggtggacctcctgtgggccccaggtcttgccgtccctgaaggctgaggcttgcagggtgcgatgctctcacagcactgctggggcagatggcggagcacagcagggcaggggcgcgtgggccggggcagctctgcagtgcgggccccctgtgtctgtctcatgctagcagggcgagggtctgggccgggcttaggctggctggccactgacttccccgagagattcttcttactcggctgcccctctactacgtgctggcctcacctccaaggactcaggcccagggttgatcctgccagggccacaacagatgtgggactggccctggtggccaattccccacccagcagaagactgccctgccctctcatccctcaggctgtgctcctgtcaggcctggtcctggaataagagccatgtcctcagagcctgtgggagcacttggtgctatgagactcgatctcatggagttgcttccttcctgggtgtcctttccctggttgagttcatctgcctggctctctgctggcaccgggcttggcactggagatcaaagcttcatgaggctggagcaggagggcccccgcttcccctaggctttaggggccagtcacccttcctggacatccaccttccccaggaacacgggttttggggaagctctctggggccctttcctgccctggcctgagggtctgtgctgggtgctgggtgtgtacagaggtgctgtctaggactcaacccaaggttgagtaggagtcgtgaaaatgctccttattttaggggaaaacagtttctcaggatgcggtattgtgttagctttagtttttttgtagatattcttaccaggttgagcacgtttctttctctgttagttgagagtttttaatttttagtcatgaatgaatcatatcatatggttttctctatcacttgatataagcatattttttttccttcttcagtctgttaatatgctgggttacactgacttttggatattgtgccagactctgcaaatccaggacaaacatgacttgtctgttgtgcactctgctgtttatacatggctggactagacttgccagtgttttgctgaggatttttgtgtctatgttcattgagggatattggtttataggttcatgagggatattggtttgtagggtttttttttttattgaactgtctttgtctggttttaatatcagggtaatgttgacctcataaaatgaatgggagaattggtgccattttttcctgagaggttagtagaattttccagtaaaaccgtctagacctggaaatttcttttttgcaggattttaaactatgaattctttttctttaatagttacagaactttttatgctatctactttgtcttgggtaagttttggtagcttatagtttttgaggaaatcatgcatttcttcaacactgatggatttatatgcatagaattgtttatactattccattatcttttttatggctgtgatgtcattagtgatatcctttttaaaaatattctgatactggtaattcatatttttttctgtttctcttcttcagtctcactagagatttatcagttgactgatctttacaaagaaccaaatttggtttcattgatcttctctattattttcatattttcagtttcattgatttttactcttatcatttcctcccttctacttgctttgggcttattttgctttttctatttgagcatgttttggtattcaattttaatttacctattgtgtttggttgtatatctttgtatagtgtttactggttgctccagggattataataaacctatgtaactcttcagagtctttttcaaatcaatattttaccacttcaagttgaatgttgagaccctgccatcatataggtccctctgtcctcccctgaatgttgttgtcttttatacacctacatacatggaaaactacatcagacagcattatcattcctctttaaaatacgcaagagcctaatctgttatattttttcaggtatttctgttgctcttcctttattcctgatgttcaaaatttctttctagcatcattttccccctgtctgaagaacttccttcagcaaccatcttagggtagatctgctggccacacattctataagttttgcttcatctgagaatgtctttatttctccttaattcttgaagtgtatttttgctggagatagaattctgggttgacagttcttttttttttttttcagcattttaacaatgttttgcacttcctttggacttcacagttttgataagaaatctgcagttatctgaaccatttttcccctataagtaatgcactgtttttctttgactgctttcaagacttttttttgtctatagttttcagagtgtgtttataacgtgtgggattgtgtttccttggatttctctcatttgaggtttgccgatctgttgaattggtaggtttatgcatttcacagaatttgagaagttttcagccattatttatccaaatatttgtttagtaatacattctttctcttctccttctgggacatgactgttagttagatctttcggtattttcccacagtctctaaggctcttggcattataaaatatttttactcgctgcagtttgaattgggtaacttctattgctctatcctcaagttcactgactcattcctctgtcatatccattctgctcttgagcctatccagtgagttcttaaagtttctgttattgtatttttcagttctaaaatttccgtttggtcctttttaaaaatatgtcttccgtttcttgctgagactatctttccattagttgccagagtttttgcccttactttatggagtatttttataatagctgctttaagatcattgtcagttaattccaacatatgtgctatctcagtcttgttatctgttggttgtatttgcctggaggagttgagattttcctggttcttggtatgccaagtaattttggactgtatcctggacactttgatattaccctatgagactttggatcttgtttaaatgctatggagaaggtcattatttttgtttgatcaggtaattaacccttgggttaattgggttccggctgcaagttccaatgtgcctgtggattgcggttcaatgtcaggtccattttcaaagcctgtgcagtcctattctgatcaatcccatgtaaacacaacccagtggcacgtctgggacctgggcattggtccacctcctaagtcagtccccagaacctatggcgtgttgtttagggtcagacccactcgtgcacggctcaagcacgagcccaggagtttctaaccaactttctgatgccagttccccaagctctgctgtctctgccatcttcctagccctgtccagtttcctgcggctccttgttaaatctctctggccagaaagctggggctttattgaccctgctgtcttgcacacttcctgcaactacactcctgggaggaccaaaagaggaaagagcaatggggtttcactccacctttctaggaccacagcacttccagctacacagccaggctcccctcttagagttttaggtgcctgtgggctgccatgagctggcgtgtgagaacacgaagaaaagaaaaaggaaataggaaagaaaaatgaggtgttggcttggctctgagcattcggaaatgctttttctatccttgagctacaacaacagggcttgtctcgagctctgtctgtctgtacccagtgcccgcttctggagtttgacctgccttgtatctaggctgaggaataccagagaatgaagagtaaactctgcgggtttgctgaacctcacattctagtcttcttccccaatctgcatgctgttatttattttgcagggtcctcagctagctgctcatgaatccagtgcatttgggtggctgcaggcagtgggggatgcaggtgaggcgtgctcacaccatcctactggaacctgaaccttctcctagggacctctctatgtgttgagcggtttataatcagggagggacttctaccagcagaaatacagccataggcagatccctgctgaacaggaatttcatagagagagggagggagatcctgcccccagcaattctcacaacatgcccagagcaactgacaggggaatcaggtctcttccaccctccaggggctgcccactgcacagaggagaaaatccaatctcctccccccagcagaggaagctctgtgcagtctgcccccgcccaccactctgacctcctgtaccccacccaggcccaccactctgccctcctgtccctcgcccccgcccaccctttgctctccacactccactcacattggccttcttccctttcctcaaacatggcaggtctgttctgacctcgggtcctctgcatgtgctgttctctgtgctggagcccacttccccagatctctccatcgctgcctctttccaatcatttaggcctcagctccagtgtcatctcttccaggaagtcccccgcccccctcaacaatactctgtgctgttgtcctcacggctgcgtcactctctgtcgacttcctctttgcttgcttactgccatttgcccccccgggagatagcacccagggtctgcattcagccacaggtcgcaaatgtgaatgcacctttgtggccacatctatcggtgctgctggcaaggtggaggttgggaagccggacccactgggccacaagtcctcagggctccttcctggtccagaggacccccaggaggaggcagctctgcctccgcagagaatcttgctgcagtttgggttgtccggggccttatcactcccccgctttttttttttttttttttttttttttttgagacggtcttgctctgtcgcccagagcagctgggactacaggcgccccccaccacgcccggctaatgttttatatttttttagtagagacggggtttcactgtgttagccaggatggtctccatctcctgacctcatgatccgcccacctcagcctcccaaaatgctgggattacaggcatgagccaccgcacccggccatcacccccgtctattttcatacatgcagtggggtgagaggcagaagtcccggcttctgctcctgtgtggcttcctactcactctacactccccttcctgacgctggccagaggctggcggaagggctgtgctgggccaggactggcttgcagttcctctgcagggagtcccggagcctggggcctgagggctgccttggaagggcacccaggggggaggtgtgcaggctgactgttcccaagcagctgggggcctgccctcgctcctctcccaggcacagcacactgtgagcggggcatcccgcacgccctgctgccaccggctctccggctgcactccttcttcacacgctggatgagaggacactgctggggcagcagggcacatggtgcaggggtcctgccctcatttgtgtcttttcccagaggatgggttgtctccaagttctgcgtcaaaactgaagttcagcatacttaagcccagtggttcacaaaggagatgcttgaaacccacttctctcccccagttactcaggtgctgcccagtggagagagatctgtgcacacagccttgtctccctgcggcatctgggcgccacagggcagccctcaagagatgcccctgtcccagtgcggggctggggaggagcccagccctgtgcgagcagatccggatccaccactcattagctgtctaatcctgaaagagtcatgtcatctcttggagcctgtttcccaatctgtaaaatgggcataatgatactgagctcacttcctttgccttcattatcttattttcaatcccttgacaactctgtaaagtaggtaatattgtgccattttagacacggaaaagcagaggtcgaaagaggccaaatagccacaagtgacagagtggggatttaagtctaaagatctcaagtttcggctgggctcaattctttccttcagcccaggatgttcagggatgacagccaggctgggcccctgagcaatgccctctgctgtctttttttttttttttttcctgggggacaggagcgagcagagcctccagaacctttgcccagatcacagtaggcggttcttgcagctgggaccagttcctcccacttggacagagtgaggagtccaggcttcactgaggccaggagggggctggccgccggctccagactggggaggcctgtgtttggggcttgtgctcagtgtgtggggacatcctccggcctctgtcctgcgggacctctccgacttttaattggctttcttctggctccgcgtagatgaagagtttttgccagagccagagccataacggtttatctgtctgctggcttgcgtttctcagactgttactgaattaagttgtatgtatgaagactcttaaataaaataatatcatcgtgtttattcggagcttggccttaaagtgcacttttgagtgtgcacatcattcttcttaaaccagggcctcctttattaggggatttatcttcactttgagaaatgtctgctaaagcctgctgtgccaaagtcctcatgcttactgctagagccacagaagtgaaggggggtctggcttgtcctcaggcagctcaaagtcagggggacggggacaaaagaccagccaaaaagtgttgcaaagacatcaatgggtgctataagaggatgctattcttttgtttctttagttttccattgtttacaattaaacattattcacaacaactgacaaaacatgattcacaataatttacattattcacaattaaaaattacttttgaacatacaaaacatatggtcattatcattgaataatgtagaaaagtattaaggagaaagcaaaaaccatgaaatcctacccttttgagatagtctctgtgagagacagaataatccttctcccaaagttgtccatgtcccagtcccgagaacctgggaataaatcaggtgacatagcaggggcagtgaaggttacagatggaagtcaggttgctaattagttgacttttaagataaggagattatcctggatggcacagtgtaatggcaaggattcttcttttttttttttttttttttttgagacggagtctcactctgtcgcccaggctggagtgcagtggcataatctcaggctcactgcaagctccacctcctgggtccaagtgattctcctgcctcagcctccagagtagctgggactacaggcgcctgccaccacgcctggctaattttttgtatttttagtagagacggggtttcactgtgttagccaggatggtctccatctcctgaccttgtgatccgcccgcctcagcctcccaaagtgctgggattacaggtgtgagctggccatgacaaggattcataaaagtagaagatggaggcagaagttcagagtcagagaggggtcagtagatgctccggtgctggctttgaagatggaggagggggccacaagccaaggaatgtgggtagcctctaaaagctggaaaaaaacaaggaaacattctccttagagcttccagaaggaatgcagccctccccacaccttgattttagcccagtgagacccattgtggacttcagatctctagaactgtcagataataaatgtgtgtgtgtgtgtgtgtgtgtgtgtgtgtgtgtgtgtgtgtgtgtttgagttggagtcttgatctgttgcccaggctggagtgctgtggtgtgatcttggctcactgcaagctccgcctcctgggttcacaccattctcctgcctcagcctcccaagtagctgggactacaggcgcccgccaccacgcctggctaattttttgtatttttagtagagatggggtttcaccgtgttagccaggatggtctcgatctcctgacctcgtgattcacccaccttggcctcccaaagtgctgggattacaggcgtgagccaccgcgcctggacaaatttgtgtttttaagccactacatttgcagtaatttgttacagctatacaaactaaccgtttttccatcttgttacatatatgtcacactcagaagtgagatcttgtcactcatgctatttgtatcaacatctttaggtttatggttgctctctcttctgccctcttgactggagcactggcttcatttattttcactctggtctataattaagaaggttgtgaacttgcttctggtggtggctttggtctcatccacaggttctgatgtgctgaattctcactgtcatcattttaaaaagatttatgattttgattccagtaacttaagagctatttagaggaatgttgaaaaaacttccgagtggttggattttaggttattaagctttgcgttgattcctagtataatccaaatgttttcagaccttagcatctctgggtttaaattgggtcttgtcagcatttatatctgcatcttgccattccagtgacaccccacccctaaccagcgcagatctcagtttcctacaagggcttgtgaatgcctccccctcaacccctctagcatttctaggcatctcccagttccgtagagcccgtccacacccctcctgccacgtgtgtattctgagcatcccaggctctgcaggtgtccctccgttcaggctgccataacaaaatatcacagactgggtgtttagaaacaacagaaatttatttctcacagttttggagtctcacatgtgagatcggggcgccagtgggtttggtgtctggtgagggctgcttcctcgctcatagctggggccttcttgctgtgtttgcacacagtggagggtgcacaagctccctgggcctctctgataagggcactaatcccattaacggggtccccaccctcatgacctcatcaccttccaaaggcccgcttcacaccatcaccttgggacaggaagagctcatctccatggaggcttggcagggccaggcctgccacagattaggagtgaaggggacagcctgggttccccgagcctcggggaatttctgaaattgcctctgtctcctggtgtttgctcagcttctatgaatgtcaggtgggcttctgaagggagcacggaatctgcgttgcagggtcactgtggcacgaggggaccctggcctctggtgctgtggaaaccggagcagctgggggcggccagagagaggctgagcaggagggtgtggaggtccccggggccctggggaggagggacagaggccatgggcattggtgcgtgggagggagcagcagaggccagcctgctgagaagggctgtgagggaagggaggtcctgtggctggaggggaagcagagtcttcttgttcaggattgaagagacccggttctgttgttgggctgagagaggactttagagaggaggaggccgaagacgcagcaggggaggcgagaagggacttgtggagagccctgagggagctggtggtgggcagtgggttgtctcggctcagagcaagagctctccgtcctctgggattatagtggagggcgttgggggcactctgccagtgacttcatcagtaggggtggggagttggcattatgccccatgatgcaagggcccaagtcaccctggagagggaagccggggtcttgagggagggtcctgggagacatggggcctcagcgtattggggaagggaacagtcaagagaaaggggcaggctgtggggagggccttctggctggacagtactagcagggagtggggcagaagggggtccccataccaacttcacctcttggttcttggtgccgagaagcagcaatctcaggtttctgcattgccaggcaggtggggtgggaggctacggctgacaggcttgggggattcaggccaggcaggcaggggaggccgggatcaatttttgtaaatgctcccccatgcttgtaaagaatactcatttgctttcggttgtaagtcgtcagatccatccagaaatcaatccggcccatttcccgagtcaatgagtctgtgcccctctgctgtggtctaggagacctgtcacccactgggagtggccgttcgcatttccctttgacagggctgttgagccacttgtgtttctaaccatggcagatgctgcggcccttggtttgtaaagcttggtgactgtgtgctttcaccaagccttgtcaatacaacaggagtttccagtcatttagtacttgctctgagttctattttgatgatactacagacaccctgctttctgggtttgcagttttctctgtctctcttttagcatgtttcaggcatgtgttacagacggcatgccttgtttgttccatctcagtctggttgatctctaactgcaatgttaaacccattgatggttgtgttagtgataccagtggcccgtccttttttcggcctgcacctttgcatctttatgcttgacttgtcccctgtccaccctgggagcaggcaggcagctggtcttcccaggcaccaccctcctgacccacagcacgcagcagcctctctctgcccgccgcctctccctcctgccctctgcccaggccgcccctggggaccttacccactgagcccatctccacctgcctcgcggtccttccttatccgagtcggatgccactggtcctctttgctgtacttgctccctgcctgtaccactgtctcccgcctcctgctttccttgctgaattgctgggtccagccccatccctcctcccttactttcctgcctccgagcaggggccccagcctcgctgaaggatctacttcgacattcctgactgctggcctctgcaggcagcatccccccttgggaccttcccgctccctgctcacccacctccttgctcacccacctccccctcctccgagcacagacaggccccggcattgcccctgcccgtcccttgagctccggctgctcccgggtcccatcattgtcagcattctcagaagcacagcccctgccgccacctcctccatggctctctggcatcacccaaagcgtctgctgaggtcccacggaccacagaggtgtggatcctgtggtcattctcctgtccccacggctcaggcctcccccatcctcctgcttcaccatcactgcatcgtccgaggcaccgccagctcctcggtttgctcttcccctgggctctgcaccttggcacgtgctgtgtggctgagcaggaccctcagtctcctggaccacagccagaaaggcatttcctcctgcagtggggcgtcctgggttggaggagccttccctcctcatggcagcctccttccacagccccacctgtctccacgcctcccttgctcccagcacaggccccactagtggtttcagcggaatatggaagggcttttgaggacgtgtgtggaaggtggccttggtggctgctcctgaatcccttccagagcctccagctcctcccaccccgactctcacttgcgggactgccccagccgccatggacggggctcctctgccctgctcagaatgttctggaccagcctgggactttgtgtcctgagtctgtggtggttgcagggaactggctcacccgtgtgcttcagggtggaaattgggctggagtgtggaagtcccatcccaaaccctagagatgggaccagcacctggactatgagagtgagggctgcctggtcgggctacagggcatgtcggatcagtcaggggcctgggacacataagggatcaacagaaaggagttgacaaaggcacaactcacagagctgcgggcaggacgagggagcttgcagggcggggaggctgggggccaccacagcgggagaaataaaaccttctgtctctctccccagccctggcttcctgtcggtgccccccttcacccagggagagccaggaggagccagtccatcaggtctgcctactgggctgtaggacagggcagaaggtgaaggggtggggagcccaacagagacccgccagcccagaacatcagcctggaaggaagggacgcagggacctggttcttctctgtgtcttttcaaagccaggtttcctttctaatccagaatctatttattcagccaggcctggtgccagatgctctcaggctctgaggatgacagacaaacccagcagcctccagtagggtgctcaaggcctggttttgaagtggaaacaatgatccatgcggccagtgggaacccgccaagttccccacaggcccgttcgcctagaggcagtagttgagagcgacaggagggcctccatgccaggagtctgcacagtgactcttccttccttctttagactgcctcagaggctgtcagcatttggggtggaaaagagttgtcctgttgagtgtatacatgacctaagtctactggagactcaatgagggaattgaaggatttttcagggaaaatgttgacatttcctgctgaccctagaaagcaagcccctccgcttggccagcaggaagtttctctggcatcaggggcaggccaccttggaagctgggcacacggggcaggggccaccctgcggatgtgggtgcagccctgcggggaagctgcagtgggggcgggggcagggcttggggtggcccttccactccccaagtctgtgggtgcccaatctccagaccaccattccggacctccacaagctgcctccttgggccacgtgggtgggtcagacttgcatgggtgctcagcatccctgggtcgggttgatcctggcaccccctagggtgggtctgctgggcagccctcggagcctggacagagcttctagccatgcacccatcttccctgttcatgggattgagtcaccaaaggaagggcattcattaaaaataattggctggctggacgtgtttctgggctgtcagctctgactgtaggctgcgtgccttcatcaacatctttctcccggttcccagtcatattttttctttttgaaagtgtctttttctgttacccaggctggagtgcagtggcagcatcttagctcactgcagcttggaccttcagggtttaggtgattctcccacctcagcctcccaagtagctgggaccacaggcatgcaccaccacacccagctaatttttaaattatttgtagagatgaggcctcactatgctggtctggaactcctgggctcaagcagtcttcctgcctcggcctcccaaaagtgctgggattgcaggccccagttcccagtcattaagtggaatgtttgagatgcacaaataccttaaaacaaaaaaacaaaaaaacaaaaaaaccttggccaggtgcggtggctcacacctgtaatctcagcattttgggaagccagggcaggcggatcacagggtcaggagttcgagaccacctagccaatgtgatgaaaccccattctactaaaaaaatacaaaaaaaaaaaaaatttagctgggtgtggtggcgtgtgcctgtaatcacagctactcgggaggctgagacacgagaatcacttgaacccaggaggtggaggttgtggtgagcccagatcatgccactgcactccagcctaggcgacagagcaagattccatcttgagaaaaacaaacaaacaaacaaaaccctaccctggaatgccaactccggtgcttgtcttgggctgggatctatggggcactggcctgttctggcctagcaatgggaggctgatgtcccacgcttgtcctgggctgtggcccggaggcgttggcacactccagtccacatgggaaggccatgttccctatctgtctagctcagcgcacggctctgactcactgcagttagcagggaaaatactcttcacattgagatgtcagttttcacttcaagcctgatttctgatccataaacaaagcctgcaagaatcagaggctgctcatgtgggagtcagctaattaatctgactttcctcaaggaaggcacaggccgctgcctcttttgtgaagattagcactttttaaggacgtgtgagtctgtcaggacaaagcaacaccaataacgttccttattttcggggagcagaggaaagtggggtcagactgtcttccccgtggacaaggaggagcggcttcaggttagcacttacaccagtgctgtgagtgagaagctgtggctgtcaccaaggtgaggtcatggctgcaggaaagatgcttcccaccctctccccccaacaacagaggatgtcccaagcccaggggaccggccagcgtagctcctgacaacctctaggaaaacaggagggcttctctttggatggcaaaactgacctcaactcacttaagcagaagacaattcaaggcaggctattggggggctggggctggaggcctggaaatggggtaccttggagggccccagccaggacctcaggaagccgtctgggcagtggtctgcactccagggtggggtgggagcttggattggccctgcttacaatgggcttctctctcagatgtatcttgcaaggagagagagtcaccttgggcaagctgactcccacccacccaggccccttcctgacagtccttctaggctgttcccaaaggcatggctggctgtccctaggatacatggggccctgggcatatatttcctgcaggactcctgtctatatagacaatttgattaaaaaatttataacaagattcatgagcccacatggggaatagcaagatgtatcaaggaagatttaggggacggggaggagaagcacgaacacatttgctcactgtctgctcagtgcttgcagagaccctcgttactgctcaggctcaggagctatctcttcctgttctttatggtcgagtgtgctgtcccagctaatttcatatttatatctcccacagctggggggtaatagcaaagctgttaccgctcacaatgtgtggctctttggaacctgtttgtgtggagatgctgtatatcttcttgccccgcattccccagccccatgtatttagtgctggttgtggcatttctcctgactccgccgcttctctctgcccccgggaatgccggcttccgttgttcccttgaaggtggttaccgtgcttcattaatgatgaccaccaatgtggatcttgcccagagtgtgcaagaaaatgtgagccatacgtcctcatctggtcgtgttaaatttaatgtttgggccaggtgtggtggctcacatctgtaatcccagcattttgggagaccaaggcagtaggattacttgagcccaggagttcaacatcagccctggcaacatagcaagacctcatttctacaaatttttttttttcttttaattagctagctgttgtggcacacgtctgtggtcccagctacttgggaggctgagttgggaggatcacttgagcccagggggtccaggctgcagtgagctgtgtttgagccactgtactgcagtgggtgacacagtaagatcctgtctctaaataaataaataaataaataaatatcgtttggacctttatagcgaagggaagaaccacacatcttgcagcctcatcttccccatcagtcctgaggctgttacttctgcactcccagaattcaacctcgtttaatggtgggcacactcccgccttccacactctgccaccagcaggcagaatgacaagagaagagggatcccagttgtgacaggcattccatccctctgcagaccagcctgggaggagagcatgatgtccagcacggcttggaggcaagagaggacacgggaagggtcgtggcattgcagggcaacagcttccctctgaaagcactccaagcaggtggatgcagccagccctggaagactgcccggaaatgacacggaacctttgagggtgtgggccaccgccctgggcaccagtgacagaggcacagagtgaaggatgtctgctgccactgcccacccctgaacaccagagcccggaggtggccccacagccgatgcaggagcccacaagtgccactcaggcttgaggcttgggcagctgtatcccagagccccgcactcattctgtctgatgtgagtgggaatcctcaaaacccacgtgtcagcatcatgctggtggctcagtcccattcacacctgtgaaggaagtcccctcctggccagtgagggtggctcgctcatcaagccactcactgagacctgaagcaacctcatagtcaacagccctagagctcctggggcatccgtggccccatgcacagggcagagggttggagagtgccctgaagggaacggcagggcccacagggcggctcaggcataggccctctgcacaagagcattgctccggctacacggttctccctggtgttcctggaacacgccaggcttgcttccttctcagggcctctgtacttgctccccgatccctggaacctaccaccttctacaggacctgctccctggacactggggatgcagtgggcgcctccactccagggaaaggcagccaatgtgaagaatggaccggccagagagcactgagggaggctggggcccagttttatttttatgtgtttaaagttttaattttgaaataactttagatctatgctgtcttggaaaaattgcaagaaaagttgcaaaaatagcatagatttcctctgtgcccttcacccagcttcctctgtatgcaacgtagaacaaggactgaaaccaggaactttgtaggttgatactaagcgttggtacttagtgtcttagttttagtctattttgtgttgctataatggaatacctgagactgggtaatttataaagaaaagaagcttatttagctcatggttctgcaggctgggaagttcaagagcatggccctggcttctggtgaggcctttttgtgctgtgtcataacgtggtggagagggtcaaagggaaagcccatgtgtgcaaagaagggaaacccagggagtgtcctgcttttataacaacccaggctcgggaactaatcaagcctctccagagcaagaattcccttgctaccttgagaacagtatcaagccactcacgagggatcggcctccatgattcagatacctcaccccaggccccaccttccaacactgccacactggggaccaaatgtcaagatgagttttggtgggaacaaaccagtcacattctaaccgtagcactccagactgcactgaattttgtcagtcttccgactcatgtccgttgtctggttcaggctccccctcaggatcccacgtggcatttagttgttgtgtctctcccgtttcctcccatctgaggtttcatgacctggatgtttttgaagaggactggtcagctgttttgtagacggtgcatccccatgggtttttctggtgtgccttgtactggcttgagcttacgtgtttctggcaggactgtcacagaagcactgtgccctccgtagggcaccacgctgggactgtcacattgggatgtccagttgtctcctattgtcagtgatgcccttcttcatttggctaaggtgttacctactgggattccactggatgccccgggagctctagggctgtgactgtgaggttttttcaggtctcagatgagtggcttgatgagcaaaccactctttcactcttttttcccattgcgatgattaaatctcccgtgggtagctgctgtgacgtgatgtgagcattctgtttcttgttatccttttgctcactaattgtagcctccacggataagtcgtacctgccgcagtcctgactgtgctgttgccgatggggtttactaccatgattttctatctcatcatttcttttacatttttagttgaattaccctgtgagaaagagctgcccttcccctcccacttatttattattcagttatttgtttctaccaatactgatctgtggatatttattttattcaatgggttctaacctattactatcatttattattgtgttcaaattgccccagatttgaccaccgaaagcaccttccagctgcctcctccatcgttccgctgtgcttgggtgtgatttcacacggggcggtgggacaggccgtctctgagcagggagtgtgggtgtgagcagagccctgcaggaggggcgcagtcctgtggcagtcagaaccagctggggggctgcagcctgctctcggggaaggcctggtatgcacaaggtcagcacctggcctggagctgccacctgctcacctgtctggtttctggtgggggccctgagatcccgggcttggcactgccggagggcggggctgtgctgcggtatggatgccgtgccgtgctgtgctgtgcaggcagggttactggacataagcctggtgtggcctttcataccctggggtgccactgtctcccagtgtgacacctggtggccttgtcccttgtgaggaccaggatctgtggggcacttgatcccatgagttcagtctccccgaatctgtagtggcatccagggagggcaggtgcgcctgagcctgcctgcattctggatacggcgcctttggtcattgctggcctcgctgctccggctctccagtgggccaaccacccacagaggggcctagggccctggcggctgctgtcctggctctagaataaatacacatcccagagtcaccagtgtgggctcaccagtgctggggccctgcccccgcccctcccccggagccaccctgggtgggtggggacacgggctgggcagtgtctgaaggcctgcagagcagcctggccacagcccagacaacctggccctcagagccctggctcttcccataaataaaccagacaggatccttcgtcagatggtatggcctgatttttgttttgggaactctggacagaaggggaagcagacagcctcgggcctggcagggctgcccgcccgggagtggcagctgggcaggcgggcagaggacggtcggcggtcagcgtgccctggatagcacagtgggccccagagatcacagcaggaaaagaagcccaattcaaaggaagcaggagtgaggcagtgcacaggctctgtgtgtgcatgaggccggaggggtcctgagaggggcctgtggcccagggacccggggagatgacagcctgtgatggaaagtgaaagggggggtcctctggctgggaaaactgcctgatctgggcagctttgcacaagcagacatggaggacatgccccactgagtctcaccatcaactctcaactgcagccccctctgggggaaccgaggctttgagagaggaaaggctgatccttgttgcacagtggagtggggggactggcgttgggcgggctgcgtcccagcctgtgctctccccatgggagttcctgtctgcccctgcttctaagggggacgtccgtcgggtagtgtgtcttccccacactgctgggagccagccaggcagctgggcccttggtgggcactggtttccctctgagcacctggcccctcctggaggagcacccgctgtgggaaggagcagaccctgcctcctgggtcctcgagactggggacctgctctccgggctgagctgccacagaaagggtattggatgctgttcaaaacacgccacacatctagaattgcataccccgtcttccaacagctgcgtagactcagccttgggatcgcccagaaaattctggggtgcagtgggcatggggagtgcccccacacgggagccttagccagcctctctgcaggaatgtgagacaccagcctcagctggctccagtcgtgggctctggagcagggctcctgctggaccgtgagagagtggcctgctgctggcggaggggtcctgaggcccgtccaccacctaccggctgtgcagcattctcgtctccctgcgcctgcactcactgccccgtgtccccatgtgagaatgcccagtttagaaggaagggtgagatgggcatcccatgtggccagccctgggcgggctcctacttccctggagtggcagctttcctccatgctggatttctggcccctggggagtgatcctggcattgaccttccggcctgtccagagtggctccccaaggaacagcccgcccagctctggccaccggaccctgccagcagcctgctccgattctgtgtggacttggcgcctggaggctgttatgggctgagtgacgccctccctagatcccccagttcctttgttgaggtcctaaactcccgtagatcaggatattggctgtatttggaggcagggtctttaaagagataattaactgaaaatgaagtcactgattcaacatgaatgactggtgtcctaagaagaagcgattaggacagaagtacacacagggggacggccatgtgaggacaggggaaagatgctgtcgacaagccaaggagagaggcctcgagagaaaccgcctctgcccacaccttaattttagagctctagcctccaggactgtgagagaataggttctgctattcaagccccggcctgtgctgccctgtgatggttgcccgagcaacctagggaaggcgccggccccgaccttttgtgggagggggtgctggcagtctacctgggcagcatctcctggtggatgtgggtgagcctgctgtgaatgctgggggacggtcctgggtccccaggccctcagttcttggagtgcagccttgcagggtttggttgctctccagggtgggtcccctggggaatctggtaaggaagcatatgttggcaactcccagacatgtgcccctgccaccccagccccctgagcagacagacccaccgtgccggctctgtctctgggagtgctggtgctcaggcgtgctggtctcccgggctggttggaggaagggaggggcggtgtgtgcagacctccaaggaggcagggaggctggcagggaacagctgtgcaaaggtgttaggttccagctggtgtgggcaggtgccagcccagggaagggcctgtcgacagggtcttttttttttttttttttttttgagacaagagtctctcactctgtagcccaagctggagtgcagcggtgcgatcttagctcattgcaacctccgccttctgggctcaagcgattctcatgcctcagcctcccgagtagctgggactacagacgcccaccaccatgtcccgctaatttgttgtattttggtagagacagggtttcaccatgttgcccaggatggtctcaaactcctgacctcaggtgatccgcctgcctcggcctcccaaagtgctaggattataggcgtgagccaccgtgcccggcctgttggcaggatcttgaatggggaagttggaccttattccatgagctctcctccaccacacgtctcaaggccacaatctgctgtggtccagctggtgagacatggaagctcagaaagaaaaatcttgctttttgatagtttggcaaatgttcctgcagcacgagtcatttttcttctttagtagagagcgccctgttatttatgtgaatgttaatttgtgactggggacgttccccgacgtgggcttcatgctgaacgagacctgggaaatgtcagccagagaatctggccgggacgagtgtcagttctcgtcacaaataggcaggcctgttgcagtcccagagtctgggtctgacccactgacctctgtgtcctggctgggtctggctggccagctctgtttcctggaggctaccccggcattggtgtgtgcaggagccatggagatgggggagctggctgcagagggctgagtgtgggacattctggacaggccaggtcccgagggagccactcaagcgttgcttgatttagcagaaggccgcctggctggcccctgcgctggccccgtgaggcattcttgtcggcatcttgtttattccattttcccccttatctttctctctgtgctctccccctttccgtctctcctgtcttcacatgaattgtctgttttgctatatgccctttgtaaaaatgtaaaacaaaaaaaatacagaaaatattaataaaaagtgaaactcacccccgatcgtaacactgctgaccctttgttacgcgtttcctaacagctgtcatgccatgatcatcatgatggtgatggtgctgccagtcggctgatttatcacgtgctgtgcccagtgctagagacgcggtatctcgcttagccctcacatcagccatggaaaccctgttattatctccattcaaccctgcagacactgtccacagagaggccactcagtcagaggtgaagtaaacatttgaatcgaggcagagtgactcggaggccacatgcttaattattagactgtgctgacgtttggcacagagatatacatgattttacgtaaggaggtcatgctgcagctgggcttgccgccttcttcggtcaccaatatgtcatgggtgtgtctgttccttaagtggtcaaaaaatctgagaaactcttttagcctagcataaatctgtaaattttgtaaaattattttgcagggcatagagtgttattgaaataatctgactggctgggaacggtggttcacacctgtaatcccagcactttgggaggccgaggtgggcggatcacctgaggtcaggagttcgagaccagcctggccaacatggcgaaaccccgtctctactaaaaatgcaaaaattagccaggcatggtgttgtgcacctgtaatcccagctacttgggaggctgaggcaggagaattgcttgaacctgggaggcagaggtctcagtgaactgagctcaggccactgtactccactccagcctgggtgacagaacaagacactgtctccaaaataataataataataatctgaccatttattgtttttgttgtctgtttttgtttgtttgtttgtttttgagatggagtctcactctgttgcccagaatggagtgcagtgatgcaatctcggctcactgcaacctcagcctcctgggttcaagcaattctcctgcctcagcctcccaagcagctgggaccacaggcgcgtaccaccaagcccggctaatttttgggtttttagtagagacggggtttcaccatattggccaggctggtcttgaactcctggccttgtgatccattcgcctcgtcctcccaaagtgctgggattatggacgtgagccactgcgcccggttggattttgggtttttttgagacagggtatctctctgtctcccaggctggagtctccaaaataataataataataataatctgaccatttattgttttgttttgtttgtttagttttaggttttggtttttttgagtcagggtctgtctctgtctcccaggctggagtgcagtgacatgatctcggctcactgtaactctgcctcctgggttcaagtgattctcccgcctcagcctcctgagtagctgggattacaggtgtgcaccaccacgtctggctaattttgtatttttaggacagatggggtttcaccatgttggccagcctggtctcaaattcctaactgcctcagcctcccagagttctgggatcacatcatgcccagcctacatttattgttatatatttgttcttacttctgtcatctaatttatgttttctgtttttctggatttttttttttttttttttttttgctgtttttctagtctaccatattttctatatggtctgccttcagtcatttggaaggtatacattagttttactagttgtgacttttctaattttgagtagaattcttcagcttgtatctactgattttagaaacttaccagtaactgttgatgctaactgaagattctgaagattaggaaacgagtgcaattaaactgtaattccttttttcttcctctactctttgtctgattgttgtgggcttgtttggcaattttttgcctgcccccatttattaaagttaaattatgaatagtttatatattacatagctttttttttccagaatatatgctaaatgtcttctgatttgtaaccctcattatccctgtagcatagatgcagagggcaattccgctatttcgacctgtgatttccccacttgccaggtgtctcagttttaaagtcaagtccaggctgcgtaaagtggcaggtggggggtgctggggagggatgccaagcagaactgagacagacgctctcgagggcattctctagcagcagggttgaagccatccctctgtgcaccctctcccagggcccagagttgctcacagtggctcacctggttagttgatagacttagggctcccatctcaagatgacatggttttaccgtgttagccaggatggtctcaatctcctgacctcgtgatccgcctgcctcagcctcccaaagtgctgggattacagggtgtgagccaccatgcctgaccaagcccttggtttctaatgcagagtttctttgtaggccaatgtttcctaaacattggcctaggaggtgaactaatgggtaccaaacatgactccagaatgcatttaattctatcaaatcccagctagctttgtggcagaaattgacaagctgatcctaaaattcatacagaaatacaagggatccagactaaccaaaatgctattgaggagaagaacagaggaagggctcatgctttgtaattctaagacttactacaaagctgtagtaatcaagactgtgtggtgttggcagaaggatagacatatagattggtagaatagaactgagagtttggaaatacatcctcatattgattcttgacaaaggtccaagacaagtcagtgggggaaagaatggtcttttcaacaaatggtgttggcacacctggatatccacatatggaaaaatgaagttggaccccttcctcacaccatacacaaatattaactgtaaatggatggatcatagatctacatgtaagagctaaaactatagaactcttaaataatgtaggagtaaatctttgttactttggattaggcaaagtcttagatatgacaccagaagcacaagtggacaaaagaaaaaaataggtgaactggacttcaagaaagtccttcatgacttcagtggacactaataagaaagttgaaaagacagcccacagaacaagagaaaatattcataaattgtatatctaataagggatttgtgtctagaatatataaagagctcttacaggtcaataaaaagaaaatggtcttattaaaaatagggaaagtatctgaatggatgtttctccaaagttaaataaatgacctataagctcatgaaaagatgcttagcatcattagttgtcagggaaatgcaagccgaagcatgatgggacaccacttcacacctgctggatagctagagtcaaagagcctaagaataatgagtattggtggggatgaggggaaattgaaccctcacacactgctgggggcactgagaatggtccagcccctgtagaggacagtctggcacagttactgtatgacccagtaattccactttgagaggaatgaaaacacatgtccacacaaaaacttgtccacagatgttcatagcagcattatgcataggagccaaaaaccaacaacccacatgtccatcaaccggcaaatggataaataaaatgtggtatatacatgtgatggggtattatttgacaataaaagaggaatgaaatactgctatatgctacaccatggatgaaccttgaaaacatactaaatgaaggaagccagtcacaaaaggccacatagcatgtgattccacgtatatgaaatgtccagaataggccaattcatagagacagaatgtagattagtggttgcccagggctgggttggggaggagaggttggggaaaacatggggagtgactgccaatgtgtacggggtttctttttggggtgatgaaaatgttctaaaatcaatagtggttatggttgaattgttcactttcagcatatagtttagatggctgagatgtatggaatggtaatcacagcaccataaagctgttatatattaaaaagcattgaactggccgggcgccatggcttatgcctgtaatcccagcactttgtgaggccgaggcaggtggatcacctgaggtcaggagtttgagaccagcctggccaacatggtgaaaccccatctctactagaaatacaaaaattagctggatgtggtggtgtgtaccagtaatcccagttacttgggaggctgaggcaggagaatcgcttaaaaatgggaggcagagtttgcagtgagctgaggttgtgccactgcactccagcctgggtgacagagcgagactctgtctcaaaaaaagaagaaaaaaagcattgaactttataatgaaaaatgattcccttttcagttgcattttaaactctctggttgagtcgaggggagtctcagtttggtgctgacagatctttaccagctctctgctacttactgacctctataacaagagagaagggcagtggtgtaggctttgaggtgcaaatagaagcccggagagagaggaagacactgggggtgcgcccagggacagagggctgctgggaccccatggaaggccttgcgtgccatgggacggccttggcctttattttacaggagtgggtttctggtttttggtttggttctttctccttggtcctagtagagttttagaaggatgatcggtacctgccaacgtgtgcggggtttctttttggggtgatgaataaacaggataagcagtaattcataggttacgtagtccagctcctcagtttgcagatgagggaactgggggcctgcaagggggcaggactggccatgaccgcattggaaaccagggcccctggctcagcgtccagtgcttactctccctgcctgcctcgccccccaccctgcccttcaaagtggagtctagctttccttagagcctcgctgggcatgtgactgtcggggctccttggtcctgttggaaattggctccggccagcttaggccaaaaaagagactttctggagtaaaggtctgtagggcctgaaaccaggtccagggaaggttagagtggccaagcaaagtcatcaggttctgtggagctcagaggcaactctgttgtggtcactgtgctcagcagaaccctggaaggcccagctccagccatagctccaagacagagccctagacaaggggtcgctctccaagaggaaggacgggagtggctggcacctggcgaggatcccatgagacagaggaggagctggtggagatgcgggtgaggacagctgtttcctaaccccatggacagctcctgcccgctggcgtcccttttggaaaagtggaaaagtcagtgtgtgaaatcctctgggatgctgaactgtaaaggagcccccagtggtgaggaccgagtggctcaaatcccactcgatacttcccactcctgggactgtccagtggtgaggacggagtggctcaaatcccactcaatgacacttcccactcctgggactgttcagtagtgaggggtccagcccccttccctgaaagctcccaaggttgttagagacctccctggggagctgggagaggcaagagagtgcccgagcaggctctgagaggaggcgccctgggaactgcaggcactgtgcagctctccctgtgagaccgtcattccaccaggcagctgtcacagcaggggaggctgcctggccattgccccgttgtccagcagatctcccaggttcattaccaaaaggaagatggggagaaagaatcttggagttagaatactttcaggaatgggaatcttagcagatgccagcatctgggggactcttggcaaggtgcgtgctgtgtgtgtatttcggagggaggtgagtttgagggcaacagggacttgcagccttgtcccttggcaaagtctgggtccctctgtgcatggacctgtgtgcttcctatgctttgtgccttctatgcttgattgttgccactgcaaccttggcacacacctgacagtgtttatgctggaggttgacagggttgagtgacagaccaggtcccagtcatacacaggtggggggctgctgatggctgcagctgtggcttccatgggaaggggcagtgggaaccagccagcctgggtgctctgcagaaggaaacaggatgcatgcttgtgtttcctgtgaacccctaacttccaggctgtctgtggttgaatacttaaaaattcagagtaatagaggagagctgttaagcctttggatctttataaatttttaacatctagttgccatttctagtaactactttaccatcaatccaactgcaaaggagcaggttctatagaaggaagaggcagggcaggcgttgtgtaactcaccaggatctgaatgccggcaacttgacttgatgacccgggtactaccaggctctgggcccctgcggtggcacctgaaggtcagggacagagccctccccatgatcctctctctgtcccccaggggagaacctggctgggtttgccagacatccacagacttcaagagcagagcgggactcacacttagagccaggtcggggtaccaacctttctgtaagaccccaggctggacagctgtggggttggacagacaggccaccagcaggctcccaactgagtgcttttcagcctagtgtgcttctggagtttctttaatatttattgagtggggagaggaaactgattctaattaataaaaattacatgtaaaaacagatacacttgacactagcagcaggaaaatcaaagtcccggaaaaaaatgcagcaaaacatagctcacattttgtgctttgctctcctgtcaattttcttctgtgtgttttagacagatcattcctgggatgcatatactgaagtgtttgaaaatcagggaataaaatgatctccacttcttccgtgaagtgccccccgccccgagcattattctggccagcggtcttggcaggacgtcagctgatggtcttggggggggtcagcctttggtctcgggggggtcagcctttggtctcgcggggggtcagcctttggtctcgggggtggtcagccttttgtctcgggggcggtcagcctttggtctcgggggggtcagcctttggtctcgggggggtcagcctttggtctctggggggtgtcagcctttggtctcgggtggggggtcagcctttggtctcgggggggggggtcagcctttggtctcggggggggtcagcctttggtctcgcggggggtcagcctttggtctcggggggggtcagcctttggtctcgcgggggggtcagcctttggtctcgggggcggtcagcctttggtctcggggggtgtcagcctttggtctcgggggggttcagcctttggtctcgcgggggggtcagcctttggtctcgggggtgtcagcctttggtctctggggggtgtcagcctttggtctcgggggggtcagcctttggtctctggggggtgtcagcctttggtctcgggtggggggtcagcctttggtctcgcgggggggtcagcctttggtctcgggggggtcagcctttggtctctggggggtgtcagcctttggtctcgggtggggggtcagcctttggtctcgggggggggggtcagcctttggtctcgggggcggtcagcctttggtctcgcggggggtcagcctttggtctcgggggggggtcagcctttggtctcgggggggtcagcctttggtctcggggcaggtgccaccatgttcatcgtccagcatgcgttgtgcgcatcgcacggtggtcaacagagacgggcggggctgtgaggagcatgttgaacgtctgtgttggagaatgccaccgcttggaggcttctggctgtgtgaggaagcctgagcccaggccctgcttcagatggaccccagtgtgctcctgtgccctccgaggagtcgcctgcaggggtgcccttccaggaggcaaggcccagggcagcatcagatggagctagtgctgttggctcagcccagtgattgtcctcagggaggcagccagggaggggagcctgacccctgctggtcagggagaccccaaactgtcccccgggttactccggccagagagtactgcccttccccaggctgagcctggcctcattgtcacactaggtccctccagaataaccccagggcctcaggcctgtggcatcgatggctcccgacctgggctgcaagttcccccagaagatggagctgccataaggggtcctcatgccccagtgtcctgccctaattggctcaatcggcccagtctggcccagggacctgtctgggagatgccctttccgtgtaggtgtgagttctgatccctagaacctgtgtgtccccagcagcctgtctgcccatctaggcctcggtttcctcatttggaaagcaagctggctggatgaaatcacttgggtggaggcgtggcctggttctcagtgtctcccaggctgcatgtgctcctgtgtgagtgtgcacgggaaatgaccggcctcatgtacagacgagtcactggacgcttggggagcttgacaccttgcctgaggtcacctggccagatagaaagggtgccaggaagtcagaacttcacgctccaggacagcttgcccgctgccgccccccagggttaattcctgcacttcatccaatgagtttcagtcataagatggatttgaggcaccagccttctccacaccacgcaccgggaccatcagtgctggaccctcccaactcctgcactggtaaacacactgcccctgtgccagtggacaggcctggctgtgttcttcccgcctgcctgctcggtgcctcccttgggggacgtggcctgcagctttggggtcatcggttcgctcattccacaggcatctgctgagtcttcgccaggcctggttgagccctgagacccagggatgagtcagaagcgtggggcctgcagggttcccaccccctcttccgctctcctcccacagccctgctgacctccttctccgacctcggtcttgccctggtaactctggttaccactgcctcctaggcctcttccccagaagcccaggatgcctgagcccagagggtcctgcgccccttgcccttcttctcatgcccctcggagaatggcacccactttgccggccacccaccaggaccctgaattacttttctgcggctgctgtaaggaaccacttaaaacagcaggaattcgttctctcacagttctgaggccggacgtccgaagtcggtataacctgacccaaatccaggcatcggcagggctgcgctccctctggagactctgggggaggacactttctggcctctgccagctcctgggggctgccagcattccttggcttgaggccacatcgctccaatctccaaagctggcatctggcatcctccctgtctgcccatggcctcgtcctctgcgcatctgcctaatccccctccactccccggcataaggaagtgggcaaggactgcattcagggcccagccagccccagagctgacctgatcacacccgcagagtctctttccaccatgtccactaccctcacagctgccagggatgggggcctgggtaactttgggggccggttcttcagccacagacctggaagcccaccaggtgcttcctcctccctcccatctcagccggctctaccctaccacgtcctgtccatttcgctcctcacctccttcatacctgccactcgtccttgtctctcatgctcccgtctggaccattacccctctcccaggtgcctgtaacaccttctccccaggaccccagacccatttttgttccgcagcccattccccctgccgcagccaccatgcttctgaactggaatcagatcaaggctccccccagaagccctgggctgcctacaatctccctcaccagccccctgagtgatgggccaccgggcaccgtgcccttgatgctcctgtccacccacctggtcagctcttcccaccagctgtgctccgtccacctccccggccatggcatgtgcggtttcccccatatggagcactggtcctctctctgactctttgcctggccagcacaaagggattgggtgggtttgggtagatgtcacctcctgccggaggcatccttcattctggagccaggcctgatgctgggctctgtgttcctccaggccctgcacctccaccagcccctgcctggcacatcagcttcccgagggcccaggctgagtgcgccgggaggcatctccagcctccctcgctacacttgaggctaggggcagccgcccagcaggccctggggggcactgactgcatctcggtctgcagaggctcccagccagcaacaggatggggctcaccgagcacctggggtcagggagaaggaggggcagcccgtgcgccaccgtgcccccccacaaccaagatgatgatatggcagaggccatcatgaggttactttggggggggtgtggtttccgcacatccagatggcaggtgccgggggctgcccaccagagggcacactcctaactggacaggggaccccggccagcgccagctaagctggagtgtcgatgggtgctggaaatgccagcttttctgattttcaagagagtctggaaatctggtcgtttatgtgaactctcctgtttcttaagtttggcaacaaattcaagcttttaaaatcccctgcatgggtcataagcttgtgatctgaaggaaacactctgaaggctggacacagtgtgcacttccagtgtgagaccttggtttatggataatggaccagaagataaaagtgtaggagctggagttgtcatgggatgggtggacctgatggtgccagcaggctggatggcagggtatggcaggggagggcagggtatggcaggggagggcaggctggatggcaggggagggcaggagaggtgagggggtctgaatcaggcctcgaagggggaacacaggtttaccagatggccgagctggggatggggtggtggggtgggagaatggggattcctgagttggcagcatggggttcaggggctgggtggctcggcagggtgcacccagcccagtgagaagcatggggtggtgcaagccgcggtctgggagggtggggcaggccaagagcctgaatgccagcatatagagcagcctgagtcccaacggaaatgaggacccagcgaggagtttgtagtcagggagggtgctggctggcctagggggtcaggggcagcagttcagctgcctgtagagtctgggctggtggctgacacagagagcaggagagacagttggggggcagtagggactggagccagttgcaggggcatgtgttccatccaagacccgctgtggtcagggcctgcgtttccaaggaaagctgggattccatgttcaagacatgaaatctcatcattctgagtgttagcttcagagctttaaaaatattgtttggcccagatggaacatgtgtgtgggcagattcaatccccggctggctgttttgacctttgtcttggactctgggctcctgggagtgggggcagcacttggcccatattgatgcactttggtggatgccctcctggggacacgcacaggcccacagctgcccttgaatgtctccctgcttctctggacggttttgactttataaacacagtaacttttctgaaagcagacagggttggtgtataggggtggagatgacccagacagaggcccctttcctagacagggtgggcggcggggggcggcctctgggaccacatgttcataccctccggccagcccagggttcaagctgagcaccagctggggtgctgggcagggtcttcaggtgggaggtactccctgagggggtctcctcgctgttccccttccttggtcttttgtgtgctggaaatctgatcctgttgtctttgtcccgcaggctggtctgatccggatggaggaggaggagttcttcatcgaacccttggagaaggggctggcggcgcaggaggctgagcaaggccgtgtgcatgtggtgtatcgccggccacccacgtcccctcctctcggggggccacaggccctggacacaggtgaggctactgcaggtgggcaggctgtgtggagagccctctgaggccctggtccccaggggagcatcccagagactcaggcagctctccacagaccagcttggctgctgaggctgagccccggtctcagtggctcagaaatgggccagctgcctggctgacggcagggcgtagcagggctgctggggctggggcctctgttctgggtgcatgtgggtgacaagcagcccagacacctctgccttcatgtctggggcctccatggtggactatgaaggctgtccaagggcccatcttctgttgcctaaaggcaagcaagtgtcgtggagcggggcgggggcccccggccaggcctgagtccagtgcctgcgtctctgagtctgtgcctgtgaagaggcctccagagccccagacagcgcctctcctgctctgtgctgccatggtccctgggagggtgcctgtggtaggtcccaaccctcacctggctgctcagggagaaaggccctgcatgctctttctggatccctggaggcatgtgccctacaaggactctggaggtgctcccagcagcctcagcagtctctgcacagactcatgggcgtctgtctttttcaactcagaacccacgtgtgccctgggcccagaaacgtgaaaggagctgccaggcggccatggtgacagtccatgactgtcgcctcagatctggcctcactgtgccagcccacacctcccagcatcccccagtctctggtcctggattgtggtgaagccagggttggtgtctgatgtggttctgcaggcccatagttctcagggtcccccgtgtggtcagggactcctggcctgtgcttggctcttgctgggagagtgggaagctgcgagctcagccctcagcctctggtcaggacccctgggtgaggagagtctggagtctggggcccaggatcgggcacacctgcacgttcacagcgagtgctccaggggcctgggctgggccagcccccgtgctgtgatttactaaggtactcccgtcactccatagcagccccgcctcatttactgtaggtctgtctgacttcctagcttgacagaaaaattgggtacagcctggcaggcatacttctaatttcatgaaacggcatcagatacctttgcaaaggaattgttccatcaggaagcccaatgtactctggagccaatcagtgcaaccggtggccccttgttccttggtgacaaatcagcgtctgctatgctgcagacagccgggccactgggtactgcctgcccagccttttccagctgtggtctcagcctcgacttatccccacccttggactattttgcagggaaggaaggaggagtaatctaggagggccagcgtggaaggggctgagcgagtgctccagacccgggggcagggccccagctttgctccttgctagctagctgctgtcgggcaagcccagtggcattagcaacccctgtgtccccgagagctcaggggctggtcacttgtgctgtgggcttggtgcttctggctggcctctcctggaagattcagggtggttctgggggcctctgctcaggtgaggtgagctggccacgtgcccttggccatgtctctgatcccagattccatatggtgcttgtcttcctgaacatggcagcccttcccccacagcctggccggccttgccttattttctgggcttctgctggtgtttggcatcttctgctgaatcctccctccacccccacccccaatccacatatctttaatgagaacttgaaattcagaacacaggaaaggaatttcaatctcagaataagcccagaaaccattggccttagaagacgctgggtgaggccagctgccaggtcaggggtgaggctgggctggaaggtgggggtttggtaatgggctgtcggggaggaggtgagcctgtccagccttagctccaggcctggggcccaggctgtggatgtgagcgtgggcctggggctataggtctggatcccagaacttggggctggggccaagtcccctttgcttgatgttcctgtctggtgtcagcagaccctgcatgaggggctcgggccttcagtgagctagctcccacgccatgcacctaatcgttcccacgtggccctgggctgagatcgacacactgactggaagggcaccaggcccagtgagtgccggagctgggtggagggcccacggtgacctcaggcgtccagctttccatctgcctgggccttttcagggcccagagtggcaactgggagatacataaaagctgtgtcctgtggccaggcatagtgaggggcacagcctgcctggcacacaactccaggacctgggtgcgggtgtgtgtgtatgtgtgtgtgtgtataggggaccctttcttccagtgaattctgagggaaccctgatatatcagtgtggccctggcagaagctggcaggaggtgctggctggcagtttcttcctgcctccccaaaagcaacgtctggaagtgggtgtgaagcaccctgctatttatgttctgccggggaaggtgacacacctgccctgggtgtcccagtggggggtgggcatctgtctgggtggcaggatatccctgcagcgtcaggggtgcctccttttcaggatgtcctgttttccccgagaagcccacgggctgctcagggtgatctcggggactcatggagcctcagggaatcattttcactaatagtctctgtcatccaagatcagttgctggattgcagattgcctgggggaaacggatagaaaatgacggttttaaagcatttcacagacaggccagggatgagtgtgtgcactgggcagcttaggcaacacccgggagaggatgttattaggaggggcaaggggtgagggagcggggagggtccttttctctcctccctggccatgctggccttggcagaagggtcctgctcagtgctgctggcctgggaacctggccaggaccggaggccgagctctgaggctgggtggccttttggggagcagtggttgaggtgtccccccaggcattctgacaggcatctccaatccctgttctctgcccttcccaaggccagctctgtgtccagggacactgtgctggggtacagggacagggcaccctgtggcattgtcctctctggtgtgtgtgcatctcatcctgtgtgggactgttgaggagggagtcctcacggagcttgaaacaataggaacattgatatggtttgtctctgtgtctccacctgaatctcatcttgtagctcccataattcccatgtgttatgggagggacccagtgagagatgattgaatcatgggggtgggtctttcccatgctgttctcatgatggtgagtgggtctcacgagatctgagggttttaaaaacgggagttgccctgcacaagctctctctctctcggctgctgccatgtgagacgtgcctttcatcttctgccatgatgtgaggcctccccagccacgtggaactgtaagtccaataaacctctttcttttgtaagttgcccagtctcgggtatgtctttatcagcattgtgaaaacggactaatacaaatgcctctctcacagctctgtgggccagaagtctgaaatgaatctcactgagccaagatcaagggtggacagggctgtgctccctccagaggctccaggggagaatctgtttctggcccatccccgctcctgggggctgccagcctcccttggcttgtggctgcatcatgccaatctctgcccccggatcatgtcgccccctcctcttctgacgtgtccctgtgcttccctcttgcaaggatgccttgattacatttaggactcacccgagtaatccaggacaggcttctcatctcaagagccttactgcaagcacatctgcaaagccctttcttcccatagaaggtacccgtctcaggttgcagggatcaggatccagcatctttgggggcaccacgcagccagctacaggatgtgaatggccctcacgtacaaggctggccacgcagtgcacagcacacccgggaggcgcccgtctgggtcacgcggaggagcagcactgtaggcttcacttacgcctccccagggcatatagcccagaggcacagcccaggcaggccctggtcctgctgcctccctcactggaccctccaccctgtcgtgtgggagctcttccctgcatgtctaagtgccagtctcagcctggcagtcctcccccaccgcccgcgttaagggacctggagcggctgactccaagaccacgtgcacagagaagccaaccctgtgctgacactgagggcctgtcttagcttcccagagactgaccttgggactctgtgaaggttgccacacagtgagaaagaccccgagtcacgtgttgagcatgtggtctctgtttcagacacacagtgccatttgcagaaagacaagagctgcaaactcagagcctgcagggcctggcaggcaatgccaacaaggacagcagtggaggaaaaaaagataattgcacccacccttggcctggctttcatttctctccttttgatggaaacgtggagaccaagaatacatctccactaaaaagaaacagcagtgggaatgcagccacacgtggtgtccagccctggccttgccatgggcacagggcgtctgggaggccctgcaaggagggacagaccctcctcaactcccttgacctcaatttggtagaagttgggtctggtgcagctgaacatcctatcaagaaaatccagacatcagactttttatgtgaactttcctgatgttaaaatgtggcttaaaatttctggaatgagaggatgaactgagaaggctccaggaatccagccacggcgctgagctcagtgagtcggcaacagctggcttggcagggcccaggccgacccgggtacgagagacagcccctatcaccatgcgaaaggaccaggcctcaggggtctggggagtcactcaggaagtgcctggttggagacacagagacaggtcctggcacaaggacgctggccaggtccagggctcagccagcaaatccagacaaagccctctttccacagaagcctccacatcagctctctgcctccagccctgggccctgcacacccagtgggagctgtcatgcctggggtcccctcccgtgctcactatatagaccaaacaaaacacggtcccccattggctacccatgctttctgtgatgcagaggtagaagcatcttctgccctcctctgtgggctgctctcctggggctcgccccggcctggccttgggacagaggaggggcaggtgcttcccatcctggggaactgctaccaggctgctgtgcacacaccctgctgggctgaaggaagagaagtcagacagcaacgtgccagtgaccttggctgcctccaccccagacaccgccggtgccaagcctctgcctgctgctgtcaggctgcagcatcctccctgacgggcagacgaggcacgccaccacgggagcctctcagcctcgctgcaccaaggaaggccctccaggagacagaggacaagcgccggcactgggcagctcctccatgtggctgagcgtggctgccacctgcagcccacagccagcccttccccaccaggccaggaagagcccctcctgacccacagtctccaccctgtgactttgccttgagttgggtaggagttttccaggccgcaggggatcctgggggaagagtgggcggcgggggtgggggcggacctcaggcatgacagttccccctgggtgtgcagagcccagggctggaggcagagagctgtggggcagcctccatggaagcagcagccttgaatgacccaaggtggggatggcgccctccagtctcacaaagagttgagtgtttcagcaagctcgtactggttgcagtgtgagggaggctggtgggggaggctggagcaatggcacaggagagagagaggagctctgttctgtcagaccacaggactggggagcaggcgagactcatccattcagtggcgagcagatagccagccccactgacacagcggatgtgaggcttggcccaggtgggggctggggggcccaggatggggcaggagggccgtgtgctttgttggggggtgccaatttgctgaatgccaggtcagagagcctttctgccctgtagctgtcgacgtccatctcagcttcctgtggctgctgtaccaggttacccacaccttaatggcttaaaacagcacacctgcattcctcacagttcgggagctcagaactctgaaataggattttaggggctaagatcaaggtgctggcagggctggttccttcgggaggccccagggcagaatccattcctggcccctcccagctcctgggggctgttggcgttccttggcttgtggcaacattgctgcagtctctgcctccctggtcacgtggcttctcctcttctatagccagctctccctcttagaaggacacttgtgataacatttagggcccgctgggaccatccaggttactttccccatctcaagacccctgatttaaacacatttgcaaagtctcttctgccatataaggtaatgctcacgagttttgggggattaggacatggacgtccgggggtcatgattcagctgacatgtctaagtgttgaaccttgggtcctaagggagaatggagagagggctttggctggatttgcagggtgagccctggacctggccagcgtcttgtgcccagacctgtctctgtgtctccaaccgggcacttcccaagtgactccccagacccctgaggccagggcctctggcgtggtgataggtgctctctctcataccctggtcagcctgggccctgccaagccactgttgccgactcactgagttcagcgcctcggcgctggatccctggagtcctctcagctcatcctctctttccaccctggagctgagcctgcagcccaggccccgggaaacccagggagaagcactgattgtgaaacccgaggcggctccgggaggcgtgcttcagggctgagcgcacccttggcagacgccgcggcgctcctgtcctcgtgcagaccgggcccttgggatggctgttggagatgccagcgcggtgatgtggcccacgcggaaggggtgggcgggggccggcgctgggaaagccgaggctgcacattctccgaggctggagttgcctggggtcagccggggagagcaggaggggccagctcccgggcctggctggctctctggctggagtctgctgctcagagcgctgccctgtgggtgcttcccaccccctgggctgtgaaggcagaagcgaggcttgcagccccagcgagggctgggccccccttattccacagtggagacgtgccagggtgtgctccccctccacggcgtctgggcctggcactccgcctgacagcccccacgtgcgcagcaactcccctgtgcctccgacataaatttagtccctgagtctcaggcttgcccttcccccgccacctctcccctcccgacatggtttctggttcaggggtggagccgaccaggtaaatgtggctggcaagggcctggatctttggtggagcaccgtgggcaggtgacaagcctgacccggaggatggtggccttggccctggcttggctgcagccccaactcgagtgcaggggacagttctggaagaccggccagtggttctgaggagctgcattagggctgctcccacagatgcttccagcactaggtgggtgagtggggtgggcagcgggcagtttggtgcagggttcagtgtgctcagccccacccggcatgctgctgttggtgcaggggtcagtgtgctcagctccacccggcatgctgctgttggtgcaggggtcagtgtgctcagccccgcccggcatgctgctgttggtgcaggggtcagcgctggtgcaggggtcagcgcgctcagctccgcccagcatgctgctgttggtgcaggggtcagtgtgctcagctccacccgacatgctgttgttctggctcactaaggggcccagagcagctcacccagcccctcaggatctcagaacctgggtgctgagatctccactgtacctgggtgcagtggcacaggggctgctggaattacgcagggcacagggcgcctgcccagtgctcactgcgacacttgctctccgtcccctttccctcctctgcctcgccatcttccacagacacagtgaattgatactttctttccttcccttggatctgtgttgggaatgtcctccaaagagcttttcgggttttgcacaaggtaacagtccctggcatgcagacagtacacggctcaggggtgaagctgtgatctgctcacgggggcatctggcgtttgatcagcaactgtgggctgggcatgccccctcttttcaggtccccagcatggcagaggcaggcttctgggagagaggcatgtgtccagggcatcttttcatgtctgtgacatctgtgccttggatgtaggagcctgctggctggggtgaagtttgggcaaggagcagtgggacctgcttgggacccaggtgaggcttccttcatgccctggctgccccatggatgacggtgaaagagacatgggcaccctgcataatggggacaaagggactgcatcccatagtgggtccctagacagaggcctcttggggatagagaggggtggggcgacaggtgagaggcgttgggtaccagcatcagggctgcagaggcagctgtagggacatctgaaggggacaggaagctcttccccagcagcagcgaggacaggcctggctcagaaactgcatttgggtccgaggtccaaactctgccagtttgtgccagccggaggcctctgaccacaggccccatctcctctcagaattctctgcaggttggcagacacttcagccagctccaagcctgaaatattttctataaaaatttccaattttctttgacccgtttctctttgaaattaatcctaggcagcgctgtgctctgggccctgaaggagctctgagcggggaaaggtcgcgcagtcagatgggcgtgctggcgtctgtcttctctctctcctgctctctggcttcatttttctctccttctgtctcaccttctttcgtgtgcctgtgcatacacacgtttgggacaagggctggattcttcggctgggatgtctctcagagctcttgacttggtccctttggctggggcttgccgtgaggtgtgggctgcgccacgagcacagctggtagagaacccggccaggagcgcagctcacgcctcccacgcctcccatcccaaactgtcggcacacccagagagagcctgcaggacaggacaggaggtgacctgggcactgggcctgtgtggagaggtggctggtgcgctggtctggttgggaaaaggccgggcacctgaatgccatgcgggttcattaatgctcaataataatgctgctccccaaatcatgggggaataatgctgctccccaaatcatggaataatgctgctccccaaatcatgggggaataatactgctccccaaatcatgggggaataatgctgctccccaaatcatgggggaataatgctgctccccaaatcatgggggaataatgctgctccccaaatcatgggggaataatgctgctccccaaatcatgggggaataatgctgctccccaaatcatgggggaataatgctgctccccaaatcatgggggaataatgctgctccccaaatcatggaataatgctgctccccaaatcatgggggaataatgctgctccccaaatcatgggggaataatgctgctccccaaatcatgggggaataatactgctccccaaatcatgggggaataatactgctccccaaatcatgggggaataatagcattagcagctctactgcttagggggagactgaggctcagagagggcaccttgcctgctgccacaagtgtattttcctgcattcactcgtcacgttcttgctatgtgtccaccatgtgtctgacaggactgggtgctggggctgtagcagcggaggaacccgatcgagtccctgttctctgggctcacagccccgcaggggagacctggtgagcagatgctcgcagacagtggagaatcctgtgaacaaagtaaaacggggtgaaagggcagcgtgagaaggcaggtaagggagggaggcgccccaggttggtgatgatgggaaagcccagccctgggaagggtgttccaggcagagggaacagcacatgcaggagccctgaggctggagttaccgcagcgtgaccaaggggcagaaggaagagctagtacctggaactgaggacgtaatgggggagtgggaggcgtgcagggccgggagggatgggtggcactcatcgctttgaagggacggtcacggtacggggtgagaattcattccctgtgcggtggaggcctttggagggttttcggtggacggcgtggaagcagggaggagtcccggtgacagatggcggtggaggcagtgggttcaggatgagtttgaggtggagcttccgggacgtggtgtgaaggaaggaatcaaggacacatcctgcccctgagaggtcacgtggctgggaggctggctggtggcctgaggctggccgggcaggtgtgctggtgggggtggccgggcaggtgtgctggtgggggtggcaggttaggtggtctgggccacgtgcaggagtcagaattggcacccatcactctgactccacagctgcccgcttccactgctctgcactgccctggcccagagggaggtgttttcccaggaaagaaggtgccaaggccaagacccatgtgttcccagactcacggggcgggggcaggagcccccaatgcagccccacaggcagccaggccctgggatgcactgccacctcctcttgctccgggaggcagaggctgtgctctgtggggcgggctgtcagggacagtgtgaggtttggggtcccatggacgtgtgtgcatccttgtttgtctagcaggaccggtccagcttccccttgcctgccactgtggggagggaccccagactggccgggatgaatggatgcaggaactgtggcctgcacgtacttaggagtgtgcagggcagggtgtgtggctgcctctaggcctttgcaggcagagccttcctgtccaccccaaggggccgcaggcagcgctaccagctgttccccacacaaaagctgcccgagacagctggaatgctccctgctcctggtgcaaactctcttgaaactcaggggtggggacatcctgggagctgacctcaggttctgttcctgcaaataggtatctgttgctgacccggcagatggcggcctgagccagcccagacgcgctcgagccctggccctgagcagccatcagggggcacctactgagtgactaaatgaattaggaaatcccagcgcttaacagactcaccactcggggcagagccagactggctcccacagcagctcctggtttctccaaatcctcaccagcacgggggctttagtgtttaatattttgctgctccggcagcaaagcggcgttgctttttgcgctaatttgcgcttctttggttactggcgaggatgagtgatcttccctgggtttgattactctgcatgtctcctattcctaagtcctttgcctgtttatctcctggggtcttatatattgggataagccctttatctctttttagatattgactttctgtcatgttcgatacaagcttttccccaggccgtagttcctctttcctttccagttttgttagcgttagttgcacaaaagtctgtttttctgtagctgagtctgaatgatccttctcctgccccgttggagccaagtttgcgttcaaggacatgcccattcaccgagggcctgcgcgaaggtgggcactcttcatggtgtcatttaataggcacggtagtcctggaagcagagagaaaactaaggtgcagggctaccactgtccaagcagtagcgggaacagcagggagcaagaagaacgtgacgcgttcctggagcacttaccgttgaccgcgtctgccagcacgctgcaggtacatcatctcctaggattcttgtaatgagccccacggtgggttggtgcttttgctgtgcccacgttacagatgaggaaactgaggtgccgacggttgcacagatagtaagctgtagaaacagtgggagccaggccttttgactcctgcatcaggagggaggagcaggcttagaacccagggctgctgacacccagtgcagtgccctcctgtccccgctcagagcctgggctggcaaaacccggtagcctgtgaccccatctgtttgttggacagagggccttccaagcaccaaggcctggaactccacttaacggctgcagaaactggggcccagcgagggtgagtgaggatgtgtctccaggtcacttagcacgttagcttcggggagaatcttttgcttacagtggaatttgcagcattttgaggaatgcctggcacacggttggtgcgtaaatatccgtgaaaagaaagaataagcatagtgcctaggaagcccggtcgcccaggagctcactccgggagcaacagttgctccctgcaggcattggagggcttggcactgacgcctcctgttgttgccacagtgtcagggctgcagactcaggttggcagctgtgggtggctactggtcccatgggcccatgggacattgggtggccctgggcctttgctagtcccacttcctcacacttgagcaggactgacttcgccggcttgtgacccatccggcagggccctatgcccactttaacactctgtcattcctgccttagaagtcgtaatcactttttgaacaagggactgtgcgtttccattttgcactgtgccctgcaaatcaagtggccagtgctgttcatcactctttcttctgtgactctgcttcctccctgtggtctcatggagctgtggtccaggccccgaggttgaggacacagggcactgcacagtggccaaaattgggggtgcccagtagacacgggctcccttccttccaggcccaagcaccagcactttctgacagttaactgtctgtcctttatttgggaatgtctgatgccagactgcagatggcgaggaagatggccctgtccatgctggaacgacagacccggtatcaggaatgtgcccctgtgactgccacaggcccgtttggtgcctgagggcagcaatgcgtgaatcccagcctctgccctggggatgccgtcgggctggagcactgctcccagcgtgccttggccactgttccctgcgcggttgtctctggacataaagcacctgtggaatcccagggctgctccccttcctctctcccttgattcatccaacagatctttacccggcacgcacagcaggaccgggcactgggccaggctctgggaccagacaggcacagccctgacctcatacagcccacagtgcactagtcagtccacaaatacctgcacaatgaaagacttgggaagtgccacagagtgagcccgcagtcactggacgttgggctgaggcctggagtgtgggttgcagttccccaggaggaaaaggggccagggcagcagatgcgaagtacctgaggggtgaggacggggcttgtttgggggtgtggcaggaggggcagggtgagggcctgaggggactggaggtcagatcacgatggcttctgtgggctccgtcgtggaggaggggctgtgccatgcagcaggtggcatggtctggtttccgaggagggtgagcacggaagaggcagggagccggcaggaggctgctgtcctgtgtgcagggagagactgcggcctggatcaggtggccatgggaatgagagcagcggccggatcagcccctcagcgccatcgtgcaggaagggtgttgggagtcctggtaggcagtccacaggttggtcagagggggatactccttgcctggcagaaccgtattcccattccaaatcaccgtgaggctgggaggacccagatcacagccccacccggctgcctgtgacagctccacccctgtctggacctcagacctgtcgaggtggcgctcgctagaatcatttcctctgtgggatccgggcctgggaaggtccctgtgtctggcccttttctcaaggacctttcccagatcattctggacacatatttgagtccagctgcagattcctagctgcgagcaatgctgcccaggcttgagccttttttggacgactgcagggactccgtggggtgtgccatgggggctgccttcagcctcctcatgctctgcctttgacaattcacgtggcaggagctggggccgaggctggggtggccaggcttggagggatggagtcaggagaacaaagggctgagatggctctgcaagtctggccaggcgacgtccagcagggcgaaaaggactaggtgctgcccaaaccacagcaggagcacctggtgggctgcggggaggagctcaggggtcaagttgacgaggagttcagtacacattgtctgggttggcggggggcggtctgggggtgtcaggctgggaataagaagcatgatggcctgctcaggtctgcccacccaaatcagagcccacagccatgggcagtcccagccccagcgtgtgcagagggctctggagggcagagctggataacactggccccaggaaggccagagcccccaggatgagagcatctgtcctctcaaccttgcctggagcctgggggtcaggcgttcgctgaggacagtggtctcgtatgggcacactgatgggggcctggcaggtgacgccagcagagatcactgggcccaggtagacacggggtcggccagcagcaggagggcctccaattttataagagaagctggaaattgattttacttacaatctcttcattttaaactgttggcagctaattcaaaatttgtgaaagccgtgtaagggttgagcagcccggggcagtggccgggatgggggtcaggaggcggcctcagtgctggggaccttcactggagcccacggcgctcaggaccgagcttcttggatgtggccagggctgcctcggagttgaaatgtacttcagaggaatttttattttcctttcgggaatgtcaagagaggcctttccagcggttccgtttctgtgaggcgaaacctgcggtcgtcctgttgttcttggaggcagcgatgaagcccatctgtagcgcatcagcgggagccagcagcggggagggcgcagggccccagcccaggcagacagagctgttggatgcggcactgagggagcaggcgtggcgccgggttcggagcagcccctggactccccgggctgggcggacagacccccggctggtgcatctggtgcccagttccgggtctgaggttctgttccccgggctcccggcacctatacccgtgcctggatgtcctccaggcccccgcagcctggagagcaaacggccgatgatggtctcaagagggttctgcccttgtgtccagaacgtcaggtgcctgtgctcctttgttctgggcaatatcccgggagctcccagcattcttggccttcatcaccacgaggacaaagctgggcttggatttgtcccgaggccttgaactgggaaggagtgtggggactcacaggcctgtaggaaccacctcggccacctttgaaactcacaatgtgggcccttggtgacagagaccccggggaccaggcctgggcctccctttcttggtgtccttggtgctccccatgggctgtggtgaccccagtgatgggccaggcagccggggccgccagtgtgggcctggcctgcggagtccttgctctggcctgacctcagtcttctcgtctgtatgtacatcggggtgctggactaaagccaggcctcagccctgcagctcttgggcggcctcgccgccccaccccgcaatgttttatttgactcgtacaacggcttcagaaatgttgagtgtacacttaaaaatcaggaggtttcacatgaaaatctcaattttcagttccttcagaaggcctggccaccctgggcgtgttcctgccagcagcactgggtgggaggctctgtgcctcctctggatgggcgaacacaacccctccctccctgccgattcgtgcctggcccccccactcatgctggccccgcctgcctggtttgcagtggagtgtgagactcctggactctggttggtagttacacgtacataaactctctccgtctctctctcctctctctctctcacacacacgcaggcatgcacacacccatggtcagagcagacacatccacatcttcatccatgtaggaaatgctggagtgaaccgagccgcacccaggagcttccctgagctgggcaccaggagcccagggtctgtcctgtctctggatgagtcctgctgccttggcctcagctgaggcctcaggcccaaagctccatggcaggcctgacactattttccttataataagcccccgtcctctttcctgttgggcacccgtgtccccaggggcgggtcacaagatgacaacttgggacctggcggcttactgttctgtgggctgagctggctgctgggccctgtgcgaaaggcacctgtgctcccacctgaaggagcctggggcctctgctctgagggcagaacaagaccctcccggtctccctgtgggaagaaggaccgtgtcagagacgctgtccacggtggaccaaggccaagctgcgggagaggctggggacagagaaggagactggtgggtacctgcccatgctcatgtgttgggggtgtaggcagaccccagggcctaccagagcagccagtggggagcagccagttcctaggcccagcagcatctgtgcaaaggggtccagtagggtcacagtgcccgaattgtgtcacacactccagggctgcccagccctgcctgctgctgcagagcccctgatccccgaggatgaagacaccaggaaggagcaagaagtggcccctgtgccatcagtgtctgtgccgtgccacccctgcttgggggcacattggttttccacatggtgtcctttgaatggaggtgaggcgggccccagccaggccataatcttgggagacggctctacctcagggctttgctgaccccattctgagtcaggccccagccaggtcttgggagatgggacagaaagtgaggggaccccaagattgaattgtaggaaggatctgaactcactggtggaggcagagagggaagatggggatgaggctgatggaaatgcagtctgctcacaggcacaaaggccacatcggcagccctagccctgagcccaccccacagttcctgacccccaatcctcaccctctagagatgacctgtggtcaagcatgaccgattctgccccaaaaatgtgtataaatggcaacagtgacaaatgacgctgctatggtcttgcctctgactttgttacccggttcacttgccatggatgtgaaggattcactttccagtatcagagtctttctgtctacccattcatccatctatccaatcattcatccatttatccatctgtcatccgtccatccattcatctatccaatcatttatccattcattcatccatcgtgtattcattcgtctacccactcattcatccatccatctatccatccatcattgatctccattcatctacttactcatccatctacccatcccccatctacccatccatccatccaattatttatccattcattcatccatcatccatccatccatccatcattcatcatccattcatctacacactcattcatccacccaatccatccatccattcatccagtcagtgtctgcaagcaccccaggccagcgccctgctgggcactgagtatgaacaatctggtctctgtccctgaagagtctggctgggggaaaaggcagactcccagatgaaccatgacaaatgctgctaataggctgcttggcagcccttcctcattgtgccctgttgtgtttctttcagccaaaatatatttctgtgcatctttgacgccatcaacagttgataggagagtcaggcagagggggctatgggcttcagggacagtgagagggagtgtgtgtgtgacctggtagcttagagaatattcttgtgggcttaatctgcacgcccccccgacttcacccatctgggcctcttctgacctcctacaagcatttgagttgcttcctctgaccttttaaaaatcaatggactataatacatatgagtatgaaagtgtgtaatccagtggtttttggcagtgttgtgcagccatcatcaccatctagttccaaaatgttttcatcaccccagtgggaaccctgcacccagagcagtcactccccattccccttcccagctcatagtgaccactaatctactccctgtgtctttggatttgcctattctgtatacttcatagaaacccaattgataatatgtggcctttggggtctggctggagtccttctaaggattgatctaaaagctccagggccccttgtcatgggagcatcatatgcccagcgacatgaatataaaataataatactgcataattccagaataggcagcagcgtgtgtgtatgaagctcgggactgtgagacaggagggagaagtggggactgtggttaaaacagtccagagtgcctcttcctaagggaggcccctcctagttcctgcagtgagatccgtgttgacactgaagtggccttgtgccctgctgccccgccctgggatggcatatattagagggggctccgatcacctctgaactgggaaatgtggagtagtgcaggacacagcagcaggaaccacagctcccagccccaccccagagagaaaggcccatgagcagctggtgcagggactggactggagccgatgatcagatttggagttggtgtggacatggcgtgtcacctctcaggagagggggcaggaagtgaggagcctgaggccaaagggtgagaagggtctgaactcactgctggaggggcatgtgtgtccccagggttgcagcctggctggggcagccagcacagtggtgacaggacaaattagagaaaaagggatgccttttttttttttgagatggagtctcactttgttacccaggctggagtgcagtggctcgatctcggctcactgcagcctctgcctctcgggttccagtgattctcctgcctcagcctccctagcagctgggattacaggcatgtgccaccacaccccccgaatttttttgtattttttgtagagatggggtgtcaccctgttggtcaggctggtctcgaactcctggcctcaagggatccgcccaccttggcctcccaaagtgctgggattataggcctgagccactgcgcccggccgggatgtctttttttataagacaaattataaaggagaaaaaaggacagaaaaaccaagacaaattgagatcatagagtaagatgggagaaacaagcccagatttatcaataatccaggtaaatgtaaatggattaaactcacaaattcaaagacagaggctgtcatatctgacaaacgagacaaaccccaaattcaaaatctggctggacgctatcaccagagtaaagtgtaaaggcaagaaaaagtggaaagtaaagtatggaaacagacctatcaggccgccaaaggcaagccgacattgctgtatcaatctcagactcaacagacctcaagacaggagacgctgctggggaaagacaggtcaccgtttaatgagaaaaggttcatttccccaagatgataaagcagttctaaaggtagagtcacttaataaaataacctcaacatatttgacgtgaactttgttagaaatagagaaattgacaaatttatcatcatttttgagagaatccaaccatttttttccaattggtgttggatcaagtagacaaaaaacccagcacagataaggaagttctaaataacacaaataataagcttgacattgatgaattttgcatctgacaagtagaggttatttctttttctcaagcacataggaaacacttgtaacaactggtcaattaagtgcaaatctcacagaaactaaaagaatagtgtcagcaggtcttgttccctgaccatcatgcctgtgagagagaaattaatagcccccaaagcaaaaatccccattatttggaaattaaaaaaaaatacttttaaataattcatgggtcaaagaagaaataatagtggaacttcaaaaatacaactcaatgataataaaagcactaaatatcaaaacgtggatggaaatttacattagaaaagaaaaaggtctaaaaattaaagagataaatttccagtgtgagtagttagaaaaaggcaacattgatccaaagaaaatagaaggaaaaagataatacaaaataagatcagaaatcagtgagacaaggccaggtgcagcaaagtgcctataatcccagcattttgggagtctgaggcggatggatcacctgagctcaggggttcgagaccagcccgggcaaaatggtgaaaccccatctctaccaaaaaaatctaaaaattagctacacgtggtggcatgcacctgtggaaccagctacttgggaggctgaggcaggagaattgcttgagcctgggaggtagaggttgcagtgagctgagagtgcaccactgcactccagcctgggtgacaaagtcagaccctatctcaaaaaaaaaaaaaaaagaaaagaaaaagaaaaaaaaatcagtgagacagaaaacctctgagttctgatcattgttgctgttaggaagattcggggtcagtgttgccagatcctcagtttttcaagataagtcaaaaataggtaattctgcagacaatctctgcattaaaaaaaaagtgtcagtaatctgaatttggcctgtgcacgtctttcctcccagagctgcttctgcacacagcacctcctctctgggccatcttctctgtggccagcttctcctcgatggccatttgtggacaagtctttgtgtgtacatatatgttcattactcttaggtatatgcctaggagaattgctggctcacatgataacacagtgtttcactttttgaggaaacaccaagactgttttccaaaatgtcctgcacgtagtgtccctcctggagggccggggctaggtcaccatacacagaacacgcagagacaccccagaaggccaattcttgtgtctagttagcagggacctgtctctgtggggtggggggctgctggtttctgactctcatctgcagacccctcaggcactggcctcgttgtttaattcataaattggggaggtgatggagggggtctgaggcctgcttttttggtggcagagtaatttctacattgggtccttgctgaagtaggtcaccatcaggcagaaatacgattcctgagactttttggagataacaagttcaaaccctgcctggctgggtttctagcagctctgcttccagtaccgtgtggatgtcattttcacttacgctgtctcacaagggcatgggtggaaagaactctgtttctaggtaagggatggaaggctcagagatggcacaattagaaagtggaggatctgggatttgaacccaggcccgcctgatgcagaattgggctctttctgctacactagcttcaggtgccggctgagccctgggagggaggagtgagcaaatgcatgaggctttgcctttgccgaggcaggacaagctgaagaggtctttctccttccctagagtgagcaggatctctggacttctctcctgtctagtgtttcagctggggctccactggcggaagcaatgtgcgggcaggatgcgtgatgcctgtgggtggacagtgccactgtcagaagacaagccgaggctgctatgggagggcgttagagggtgacattggcctcccatcagccaggtttcgaaagttaggagcagatgtacagggtttgtcacccaactacttgctccccttcttggttaccgcatgaccaacccagtggcctcccagggccttgcgctacacaacactggacagccagaaagcaggtaatgctgcgtcacccacagagggttgcctggggcctgggctgggctggaaatggctctgagaacagaggtaaggagtagatcattgtttaatctttcctttatggtgggtttattgagctgtaattcacatatgctgtagttcagcgtttcgggcgcataattccataatttttactatattcactcagctgtgcaaccatcaccacagtcaactttagatcattttcattgctcccaaaagaaaccctgtacccacgagccatcattccccattttccctcaagaagtgttacttcttcctttgcaatgtggatgccttttatttatttatttttttcttgctgaattgctctgactagaatgtccggtactatgttgaatacaggtggtgagagcaggcttccagtcttacagttgaccatgatgagtacttttggcttttcgtaaataccctttatcatgctgaggaatttcccttctagtccttgtttcttgagtattttttgatcacaaagggtgttgggttctgtctaatgctttctctgcatcaaccaagatgactgtgtggtttattttcctccattttatgaatgtagtgtattatatggattgatttttgtgtgttgaaccactcttgcattccacggataaatcccacttggtgattgtatataagccttttaatatgctgctgaatttggtttgctagaatatcattgaggatttttgcacctatatttataagagacattagtctgtagttttcttatgatgtttttgtctggtttcggtatcagggtaatgctggcctcatagaaagatggatattaattctttaagtgataggtagaattcccagtaaagccatctggtcctaggtttttctttattgggagtttttgatgactgattcaagctctttacttgttatagatctgtacaaattttccatttctccttgagtcaattttggtagtttctgtgttgctaggaatttgtccatttcttctaggttatttaatttgttcgtatacaattgtacataatattctcttataatcatttttatttctataaggtcggtagtaatgtccccacttttgtttgtgattttagtaattggagccttctctctttttatcttggtcagtttggctaaatgtttgtcagttttgttgatctttcaaagaaccagcttttggtttcattgagtcttcttattgtttttcaattctctattttgtctaccttcactataatcttgattatttccttttttctgctagctttgagtttctgttgcttttcttctggttccttcatgtgtaaagttaggttattgatttgagatctttattatttttaatgtaggaatttgaagctataaatattcttctgggcactgcttttgtatgtcctttaagttttgggtatgttgtgtttttattttcatttgtctcaagatttattatttattatatattctaatttatcttgtaacatattacctgacctaatggttctttaagagaatattgttaaatttctacatatttgtgaatttttaaagggtttcttctgtcattgatttctagttttattccactgtggttggagaagatgctttgtatggtttcagtctctttaaggttattgagacttgttttgtgacctaacatatgacctatcctggagaatgatcatcatacatgagaagaatacacattctgccgctgttgagtggggtgctctatgtatgtctgtcaggtctagttgatttacagtgttgttcatgtcctctattttcttactgatcatgtgccggttgttttatccatttttgaaagtggaatattgaagtcttcagctattattgtaaaatggtctatttccatcttcaattctgtcagtttttgcttcatagattttgggattctgttgttaggtgtgtttatgtttataattgttatatcttcttggtggattgactctttcatcaatatataatgctgttctttgttgtaaaatttttggacttgaagtctatcttgtctgatattagtatggccatcccaggtctcttctggtttctatttgcatagcatttctttatccatcttttcattttcaaactatttgtgtattttgaatctaaatttggtcccctgtggataagcatatagttggattatatcttgggattttttaatccattctcccattctctgaattttaattgcagcatttagtccatctgtatttaaataattactgataaggagggactgaattctgctatctgctatttgttttgtatatgtcatattctttattcctcaattcctcaaatatttccttcttttgtgtttaacacattgttttttagtgtactgttttgattcatgttttcatttattttgctgtatatttaaaagctatggtcttattggttatcctgggaattacagctattatcttaaacacataacaattttgtttgaattgatatcaacttagtgtcaatagtatacaaaatgctttgctcctatacagctctgtcttccccaccctttattataatattgttacatttcatacatgtgtgtctattaatgtagatttataattattgctttacgcatctatagactaaatcatataggaaaaaagagaagagttacaaacgaagattttggggttccctttattagtattcttcatttcatcatatggctttgagttactgtcttctgtccttttatttcaacctgaaggactttctttaacacttattggagggcaggtcaactagaaaacaaactctctcagtttttgtttctctgaaagtgtctaatttttcatgtatttttgaaggatagttttgttggaatttttagccgcaggacagtatttttttcagcaccttaaatatgtcatcccgttggtttctggcctttattgtttctgatgacaaatcagttgttaagctcattgagagcccttgtatatgtggcaagctgctcctctctcgtggatttcaagactctctttttgtctttgtcttttgacaatttgattacaatgtatcttgatgtaactctttgagttttcaaacttggagtcattgagctccttggatgtgtagaatcatgttctttttatcaaatttggggaatttggagccattgttttttcaaacattctttatgcccctttgtttctctattctctttcttgaactctcatttttttgtattttggtgtacttgatctcttaggttctgttcctttttcctcattctttttccttctacttctcagattggatgattgctgataatgtaagtttgctgattctttgtttgcctgctcaaatctgctattgaactgatctattgaaatttttatttcagttattatgcttttcagctccaaaattgtttgtggttcctttttataatttctatttctttattgatattctctattttgtgatacattatgttcttgctttacttacgttatttgcccatggtttcttttagttctttgaacacatttaagacaatttatttaaaatctttgtctggcacatgaggtgtctaggcttcctcagggaaggtcttttttatttcctgtgagtggaccatcctttcttgttattttgcatgctttgtattttttgttggaaactggacattttgaatgtggagactctggaaatcagatgccccccacttcccggggcttgttgttttttatgtgttgttgcttgtttgtttagtgatttttctaaactatttttgtaaagtctgcattgttcattatatatggccaccaaagtctctgttttgttagcttagtggtcagctagtgatttgacagagactttcttaaaagccagggtaggaagaaatactctcctcgtctttgtagattggttctgtgtttgagcacacctttgatgcttagccagactgtttacaactctgtcttagccttcacttcctacttgtacagaccctaaatgtcagccagaggtgaaaacttttgagtcttcttagaccttttctgagcatgcatctcaccctagacatgtcagtggtagaatcctagattctctggtatgcacaagagctttccaaaaaccttatttcctcaaatatctccttccctaccctcttcctccccaagcctttagatatgtttattgtgcgtcttgccccaactattgtcctgtgccccaggtgtctgcagctaatacatttacctttaaatacttttgacaaacactgtctgggaaaccacttcagtcctggggaagctccgagacagttgaaacaaaggcaagccagcagatgggttaaaacccacaaccacaattctctggatataaggtccatatttctttcttttgagttttcaaactgggagtcattgagctccttggatgtgtaggttggtatcagcaacctacaccaggaatgtggtctgccatcttcatggccactgctgagttggagaataagataatggtaagcaagtaaattaaaacaccataacccactgtcaccaaaattcagtagctgctttcttcattaagcattccctggttgttgtaggtttctggttaaattctggagttccaaaaaagtcgattctgagatttactagcttatttcctgtttttgtggaggggcagaattttggagtcctctattctgtcactttggtgatgtcctctcccttgtcgtatgcatcttatcagaatctttagatttatattaacttaattcctgtgagctatagaaacattactcttatatagctctattcttccacccccatctttgttttttttttttttttttttttttttttttttttgagacggagtctcgctctgtcgcccaggctggagtgcagtggcgcgatctcggctcactgcaagctccgcctcccgggttcacgccattctcctgcctcagcctcccgagtagctgggactacaggcgcccgctaccacgcccggctaattttttgtatttttagtagagacggggtttcaccgtgttagccaggatggtctcgatctcctgacctcgtgatccgcctgcctcggcctcccaaagtgctgggattacaggcgtgagccaccgcgcccggcccacccccatctttgtactgttcttgctgtgcaacttgtgttggtttttgattgctgcggtaacaaattaccacaaatttagtggcttaaataatgcaatggtattattttgcagttttggaagtcagagtctgaaatgagtctcactgagtttaaatcagggttttggcagggttttgttccttctgggtcctcctccggggaggatctgtttccttgccctttccagtttctggaggccacctgcattccttggctcatgacttctgtccttcgtcttttatgccagcaacatcaggccaagtccttcccgtgcagccatccctccagtttctctcttctgcttcccccttccccctctatggacccttgtgattacactgggcccatctggctaatccaggataatttcaatattttaaagtcatctgatttacaatgttaattttcctttacatataaccttacagatagataggttctggggattagaatgtgaacatctttggagggccacagttctgcctaccacacagctatatatgctacaaacctaacaattgttgtaattattgctttatataatttcatgcttaaagaagctgaaaaaagagaggagagtacatatatatcaacagtttgccttcctgttgaccatttctggctctcttcatttgttgcggtggattcaagttcccatctggtgtcatttttttactccagtagctgtgtttctgttcacctgctttgtgctgttagtcaaatatattacatttatatattatatgggcccaataatacaattatatacatcttcttctatattattgctttttaagccagttaagggaagaaaagagaagaaatacccatttatattgtcttttaaagttgcgtgattacctttactggtactgtatgtgtgtgggtgtgaattcaagttaccaactgaggtcacttgctttcagcttgaagaacttcctttagtatgtctgataaaatgggtctactcataattctctgtttttacttatctgggactgtctatattgcaccttaattttgaaaaatagttctgctggagaaagattcttggttgacagcttttttacattggatatgccattctgctgccttctggcttccattattagaagtcggctggaaatcccactgggattcccacatatgtggcaagtcatttttcttttgctgctttcagaattttctctttgtctttggctttcggcatttttactatgatgtctctgggtgtggatctcttggcatttatcccgtttgaagtttgctgagtttctcggacacgtaggttaatgttttcaccaaatttagggagctttttgccactgtttcttccatcttttctgctcctttatactcacttgcctctttctgggactcccattgtgcatatgttcatgccctttatggtttccacatttttcttaagttccgtttacttttcttcattcttttttccctgtgtccttcaaattgcataatgtctattgatctgttttcaagattctttcttctgccagttccaatctactgttaagcctctcagttatggtgcttttcaactccagaatttccatttggttcttgtttataatttctctttattgatagtctttatttgatgagatattgtcatcatcactcctttacataagcatggtttccttttttcaaagacatatttccaatggctgctttgaaatctttgctgcaaaatctgacagctgttacatctgacatctgggctttcttaccagcagtgtctgttgccgcctttttttctgtgaatgagtcatttgtgtttctgttgtgtgaaactggacattttgggtcatgtggcagctctgcatactgattcccctcccccatctctgaggctgtttgcagttgtttgtgtatttatttgtttcctgatttggttagactgttttcacaaagtctgtattcttcacagtgggaagcctcagctgttggagggcacagccttgagcgtgtgcagggtcatcccgggatgacagtgatttcagcagggctccctatgactgtccctttctctgatctgtctgttacactctctgcttcatttggtatcacacccagctactaggcttcactaattgagggatgattgctctattattttcaacaatgtcctgagacataaattgtcacatagtttgatccaattaaatttgggtagggatgattttgaggccagtctttgaaattcattctccccctggaagagatcctcataacgatctgttctcctgatttttttttttttttccagtaaataagctggtctgtggttcaggttgttgttctcatagagctgtcagcctcctcttaaattcttgccgccagaatcttcactgaagccaccactccaggtattgggcaggaggtagcctctgatcttcttggtttgcctccccctagcatggaatatttttctagcaagcaggctggacttagggtgattaggagcccagcactctcgccctgctgcacctgagacggagctcctgccctgagttagggctgggtggaggaaggtgctccggcctctcggtcacactcagcagggagttaccctctgtcactgggagttggagatgatgagaaacgctggtggcccatctatcctggtgaaatactgtattccttgactgggatctgagggaagagggagccctgtgttcttggccacacacccccagagtggaactccccataagctgaactggaaggactagaagcggggaagagagagcaagtgatggctcaggtgccaccgattcttgctgttcttactgggatttttcttcccaagatttggttgattttcttgaatagatgatgttgcttagtttgttgtgtgctcttaggataatttctagagactttaaattgttgttgatggtgacttttcaatacttttcaccagttatggttgttctgaggggaatgtgtccatggggctcctctcaccaccattccagaagtggaattctcatggcagatgattcctaatctttttttaaagggccacagcaataaggaaggtagaagacactggatatgtcagggtcattcaaggtataattagagatccaaatccaattaagccaagaaaaggaaatttgctggcacacgcgagcaagacagcaggcaccgctggcccacacgaggctgccaaggctcagcgtctctcctcctcctaggacttggctctcttctgcagagacttccttctcagattggctcttcacatacgcagccccaggcctacgctgtgagcttactgagccaggaagggaatatttttttctcccaatgttcagatctcatggaagacccatgattagtctcactccagtcatgtgttcaccccctggaccaatcactgtgctgagggcattgagtaccaggtgtgggctatgtgcccccccaccacagccactggggagtaggatgggcatgaattacccatccaccagagacacattgggtggggcaaggcccttcccgctggcggaaaggggctactggtgtgaaaaatcaacaagatggtcccccacttgccccttttaaaaaatgcgtagagataggtacacacactattttgcctatagtttattttaatgcactgtaaatctcttcgacatactcagaacttaaaaagaaacttcatgtgcattatctcttttgactacacttttcctgcaaaaatggtcacttcctgaaaaagtgaaataaattcaaattgcacaagtaaaagaaagaggaaacttgaattctgcccaaaggaaacttcttcaagaaggctgtgctcttttgattttaatacactgaaattacagaatggcctttgacatggcaattttcatgtcgttttgaacgtcaaattgattttgactctgtttggaaggcagtgaggcccaaagccctgactcatgaaagagcagaataacaacccgaactcgcctcgttttgctggacgtggaagcccggctgggttgatctgctgtctcctcgttttccaccagcgtgaggtcatctctggcagtgtgtgcctcacagaggctggctggggcagcaggtactggccactggtgcagggtcccattgcctgcgatgagggacacagctaacgttcccgaggagcttccaggcaccttgcactctgtccctggcaacacagtgacaaggctttgttcctccacccgaaacaaggcagtggcatggcctccggttctcgaaggttcactcctatcttccgctcacacttcagtttctttgtagtcttgaatcattgttctccagcatattctacagagggccttggtctacctcacccatgcagctaaacccatctattagggaaaccaacactcaagctcactcctgccattaaactctcctgagatttgagtttcctcctctttcacaaaaccggaaatcccttgtaagttaagccaagctcattaacgttgtcttctgcggcatccatagagttctgccaggagagttgaaccctgttcctcttccctttaccggacaaaacctctgggagaggtgggctcaagctctgaatctggtgacgtttatggtttccgcagcagtgtgtctattggcatcgcgtatcagggtcgagggcggcaaggcatggggtctgcagagtttctgccctcccccaaacagcaagatccacacgcactgacacgcgtcacgggaactcatttgacacaggatcaagtttgcaaaatttcccatgaggtcgaccatgaccacagctgtcaaggtttccaaaaaggactccccactggatttggccttggtcataccttaaaccttcttttgccagcggcccctatacctgcataatccgttgcagtgttgcattctgatgaccttctattttcccggttcccttttgctccgacctgtgctccagcaaacctgcaggccattgatgctgccgccttgtcacggtctctcacaccactgatccttccctccaccccttacccagcctccttgtcttaaactgcaggttccctcattggagtcactcttgctttgtaacatctactgaacaatgccctagtcctggtaaaatgaaactttctacctacttcatgctggcacgggtacccctgaacaaagctcagccctgcttctgctcttgcttacgatgatgttcaccagcaaggtgccgctagcagccagactgctcccctcagtctgtttgcctccttccagatgacttttcatatcttccgtcctctgaacacctccaacatctgctccctatccgcattcacacctgacggcttccctcgtctgtcacctactctcccagctttttgctctctcagcagcaccccctaggtggagacgccatcttcgattcctctcctctcactgtgtcttaaccccacttggaccaggcctctgtgtgtgccactctgccagaggcaccctccccgaggtcatcatgctgctgcatctccctgccaatcctcagtcgccatccctagcacgtggcaggctagtccctcctgctcccttggtgtggcttaccggacacccactttcttggtctaatcacagcactcacagttcatccccgtttcctttgctgatccttcctcttcccgcaccctctggggttgatgcgcccagggctctgtcctggacgctccttggtctccctctgcacccctctgtgggcgatctcattcctcttgttgctttatgtaccatgaaatggctcccagatttgcgtctccagcccagatctctctcctgcacccaagactcatattccaactgcccctccaccttccatgctctctgtattgcccacgctcctgactccagcagaatctgcacctcatctgtctctgcactcttcaaatccaagttccaaggcatttctctacttgccaacctcaatttggaagtaccacctcagcacgcccctcactgaactcgcgctcaccctctccgcactccaccctcggccttccccagctctgtgcacggctgatccttccttccatttgcacagccaaagctctgcagttagggttgacccctctcttcctctcacactgatgagaaacctgttgagaaatctttttaggttttctttcaaaatccaccccgaccctgatcacttctcaccatctccacggttgtcacttgcgtcaagcctttgtcctcttctgatgactttgggagcccccagcagacctccctgcctccccacccccatgtgtcctcaacacagcagcagggattcttttctctaacagctttattgagatataattcacatactatacaggtcacccatttaaagtatacgattcaatggtttttattatattcacaacatcttctccctccccaaagaccccacaccccttagctgtcgtccttcctcccccaccaccttccaggcaaccattcatccacttcctgcctctctagatctgcctactggggcatttcctgtaagaggaatcctgcactatggtggaagggtcctggggcggtccgtggtcagggatcctttgatgccttctgctggatcatgtctgtcctctgctggaaatcccacagtggctcctgcttcgttcagctcagaagtcagcacccagcacccgggccacctaccagaccccacacgacccagcgcctcgccctgggaccccgtggcctccattttccttctcactcacttgattcctgccatcctgggcctccttgcccttcttttcaaaaccccacatggggtcctccttccgcctggatgccctttctagacaccctcagctcaccctcccacctcattcgagtctttgcttgcatgttcccttccagtgggacctaccctggcgctctaaggctttgtagacagctccccccgcaccacctgccctggcactcgcagaccctgtgccctccagccccttcccgcagcactcactgccctccggcatactcagagcactggcaccctctgttccttctgctagcgtggccgctccacagagcagggagctgcggtgactcccacggtctcccaggagcagtccctgaggggagctggcccctacacagtagctgggggtgaatccgtggacacccagcaggtgaaaaccgggactcagctccctggagagatgtctgcggttccacctgctgcatgttccagagaactagagcagctccaagttccgctgtggcttccttcaagctcaggaggaatatctgtgagcccagagtggatggaactgcttgtttcttccaagccacagaacagcttggctgtttccagagtgcacagcctccccaaagtctctccaagaacatggcttcggtgtgtgtttattgtaggatgttcaaggcctccgtggggcggggcagggggaccccaagttctggttaagtaactgtcctttaacaccgccgttctcaggagccacagctacactgcggcgtgcgtgtcgggagcgatggctgcctgggactcttcagcttgtgggtttgctcttcctttctcaagcaccttgcagtacaagaagcactgggtttttgtgtcctggtgaatccagggatcaaggaaaaccagaggacacagatgctccaagatgcctccttcctttcaccattttccagacaaagcagacagggacacagagaggcccagagcccctcatcaggccccgtctcctttaattccgtcctcattaaaccctgctagactttccaacatgctgaccttgagaatcacacatcgcctcatctcccccagcctcccagagctgggcagcaccgcttaactgacgcgactggatccaggtgacgaagcctttcttgagagtagctgaagtgacactgtcttagtcagtagaggctgctaccacaaaaagcacccccaacaccaggtggcttacatagtgtttatttctttctcatggttctggaggctgggaagtccaagatcaaagtgctggcagattttgtgtctgctgagggcctaccttctggttcacacatggcaccttcttgcactttgtcttcatgcattgcaaggggcaagagagctctctggggcctcttttatgttatttctacatttttaatttaaaaaaatgtttagagacagagtctcactcatcacctaggctggagtgcagtggcacgatcctagctcactgtgtccttgaactcctgggatcaagcgatcctcctgcctcagcctctcacgtagctggggctagagatgtgagccaccacatgcaacatatttttttttatttttagtttttgtagtgatgagggcttgctgtgttaaccaagctggtcttgtacttctgtgctcaagctatcctcccgtctcaaccccccaaagtgctgagattactggtgtaagccactgcacctggccatggggcttctttgataagggcactaatcccattcatgaggccccaccctcatgacctaattaccccccaaaggccccacctcctaaaatcatccctctggggattaggtttcaacatatgaattttgggggtacaaatattcagtccatagcatacatcgaagggggaaattcttttttctgaaaccaggtcttgctttgtcacccaggctgaagtgcagcagcatggactcggcttactgcagcctcaacctctcagggtcagtcagtcctcccacctcagcctcccgagtagctgggactgcaggtgcaccccattacgtttggctaattttttttatgtgtatggagacagggttttaccatattgcccaggctgctcttgaattcttgacctcaagtgatcctaccgcctcagacttccaaagggctgggattacaggcatgagccgcagcaaagaaagtctttttaaacgattctttatcagaggcctctgacagctcattcttgttccccaccttaagcacctctggctttcattgatattgcttgcttgggtcttagggcctcagtcagggcctggaggttgggatttcctggtgaatttgatggttagtctcctggttcacccttacgggagtggctggaacaattggcgtccctcttccccaagcacctgaagacaagtcctgccctttgtgtgctcagagaggagggagggaaagtgatttctgggcccaaagtccaggacttggagggagggaagaccccaaacacagcacagagggacgatgcccatcattgctcccaaggcagctcttccccctgcctgggagcggagctgacctcatggcagagggctaggcagagtgtggttaatatctcacaaggcacaggacatctggaagctgagatgtgccaagaggctttgaggctgagcatatttcagggctgggatgggagggagattctcatctgtttagtggcagctagaccaggagggcacctgggaccaggaccaggctaggtggacatgagtggtcacaggaggctgaggctgcagggtgtctgggaaggcacttggccagatgcagagggcaacccatgccctgagggtgggggcactgttggagcaatcccagtgcagggagacccccaggatctagcaggagctctgtgcagggctcacatggttcatgggggcccagcaacagagaggaccctattggcaaccatcagcactggattctgcctttggtctgagcagaggtggtccaccccgcttcccctctccttcctctctgcccttcctctccagggcaaggcctggcctaccagcactttcgttggccctgctcagatgcttgggactaggtgggaacaaggccctctcctatgagagttcctggcagcaccaacccctaggacctgagacaaaggggccaggtgagtttctttaagggcccctcgctcattcgatttggggtccctctgatttccatgcagcctgggacttggtaggacttggacacacataggctggcacctggctccattggtgtgaaggcgtcagttctgtcccacacaccctgagcatttcatgctattctgaggcatgaggatgagctcgtattcttgctccttgtctattccttcatcccattgtgccaaaccttcatgagcctcctctcagccaaggcaggtgacccagagatgaatctgatgcatgattttacccctggagctcatggtctggttaggggacttggaaactggtgagcttatacttctgcatgatcagtggtttaaaagaaggaagcacagggtgcttgagtctaggagagagagtaacttgctctctttgcgggcctaacgagctgggagctgggttttgaagactgaataggagtctgccagaaagggcagggcaggcattctgggcagagtgagcagtgttttctcggacccatggctgtaagggcgttgcgggaacatgagcaggtccctgggagggttggcaggcaggtcaggcccatcaggaggccctagccagtgtgctcgcactcccgcacgggtctgctaggcttgggaagagggaggtacagaggattttaatgggggcaagctcaggtgaggactcgagctacagggagtgaagggcagggagcagcagcggatggggccaggtctgggaggaggctgctgcatccaggtagagggaggggctgagctcatcatggacggggagatggggaaggtgccaggatgcggtgactccttggatgtggagatgagatgggcacagcagcaatggctgatgggttggggtagggaaaggtgacaggtttgtttgggacttgttggcatgaaggtgccttgtgacaccccaggggcagttgcaggcagcagggggcggggtctggagcctggggaggtgcaggctggaggtgggtcggggggcacctgtcagcaggtccatggtcatggaggtcaaagcagcaggtgtggagcaggcagagaggagagcgagggtgaagccctgcacacggaagcccagtcctagtggatgagcagcgtccagggcacggtggactgggccccacttcctgtgggggtgcagcctccacttctctctgagatgcatggtgaggccttctccatgcagagctggagaagtcacctgaggactgcccacctgggtgaattcaggcagagcagcaggaatcccccacagagcaggggttaagcctcgagggctggtgatatctctggcatctgatggggagggcgcctgtggcaggagagggtctcttctggcagagagcttgcatgaagtccagctgccctgagccaggaagagttactgggaggacattaggaaacctgcagagtccacggggagtcgggctgtggaagggcctggcagtcggggtcctggacacaggagggtcttaaccattgtgaccaggtgtttagtgacaccactaccttttcctcttctggctcctgcggctcaaatcccacactctgtgagggagaggatgtttggcttggggagggctgtgtgcatgcagggttccaggaattccaggaaataacactgggctgctgctctgagaaaggggagaatggatgctgggccacccccagaccttggtgcctggtccttggggacctggagatggctgctcagcggcttgagggcttcagtgtagtcagtgtagtgtgtgtttctgtttttttgtttttgtttgttttgtttgtttgttcattttgttttgttttgaaacggagtctcactctatcactcaggctggagtgcaatggtacaatctcctctcaccgcaacctctccctccgggttcaagcgattctcctgcctccagcctcccgagtagctgggattacaggtgcctgccaacacgcctggctaatttttgtattttttagaggagacagggttttgccatgttggccaggctggtcttgaactcctgacctcgtgatccaccctcccccaccctcagcctttcaaagtgctgggattacaggcgtgagccaccatgcccgggctgtttttgttttttaatgtgacacattttaacaagcatagcatttaacaaagcagataatatgatacaacacatacacacaagatacactgtcacagtcatgggagatggcactgatgatgttcagtcagtatttaggcaggattggaaagaaaaatgtctctgctgtgttttgcacacttgtacacagacacagaagttttttattccaaaatgtggagttatctgcaactctgcaaattatacttgatatttacttttcttgatatatttgctgaaaaacgattctcccagtaaacagtggtgatttctcagaacagtagttatttgtcagcagcctttaactacggcaaacctttttcacttgagtttgaagggtgaacgccttcccgcctcccgacacagatgctcatggtcgtgcataatttcatgtgcttccattctccagacttgttggaaatgccatattttatgcttgtaattagtcagatgagccaaaggatttgaaatttaaacatttgaaccctaagagaatcttgaaactttaaccaaagaaacagaagaagaatgtatacaaacatgggaattgcagttcaacagccctttattaaaaaaaaaaaggtattgtgctggcagtggaatcaaagacaaaaatatgatcatcacagtctacaaggcactttaccgatctactcatcctcatcctgatgcagacacgcgtgggaatcgtctgagtggcaggacctgcagccattgtcacccgactttacagatgaagcagctaagaaatgactcaataaacttatagtgatttgcttgacatgtcagagttaaaatgtaacagccccagaaggagtggcctagcacagcgttcaagagcacagactcttggtagccatgccagggttcatatcctggttctgacacttccgagcagtgtgaaattgggatagcctttctcagtttccccatctgcagaatgaagataagcatcacagctaactcacacagctgctgcgaagaatcagtgggcaactatagacgaggtgcttggaacagtgcctgagccaccttaagagcagtatggatgtttctgtctgtcagggatcccgtgtggcttccatggcgccgcacttgggcatagtcggagatttgataaaacattggtgcaatgtaacagccgcacacaggtgcactggcttagcaaactggagtttggattaatttaatcaaaaccaagtgtcgagagggcaccaaagtccaggataaacgtggaatatcttcctggagcatcgattttactttaaaaagatgcactctatttcataatgtaaaattgacactttttaaaagacagaatgcggaggcaactgtggagttctcatttttggcaaaagctgatacgggttctgccttcactctctgggatattggctaatttcctctttttttttttctttttcttttttctttttttttttcctagagacagggtctcgctctgtggccccagctggagtgcagtggcacaatcatggctcactgcagcctctaactctggtactcaagtgatcctaccccctcggcctcctaaagtgctgagactgcaggggtgagccactgcctctgctgacttcactattcactgcaccgagaagactctcatgtgtatttataacaatttggataaaaattttggacattgatccatgtcagctgcgagacagggaacgacttgttatatgcaccaatttgtcctttaattacttgttaagctttgatttgtcctattatcagaattctcatcctcttctctgcaagtttatgctcgccatggtaggcgactgtagaggtcaccggccccttacagttcagcaagtgtggatttgtgcagacaccgggacgccatcagcacatcgaggcggtagacactcgtcttctcccacggtttccttctgtcccttcatttctgttgctgttgttgtttgcttttgtggaaagaacacttaacgtgagctcagacctctcagagaatttcgaagtgcacagtgccacatggtcagctacaggcacaacgttgtacagcagacctctagtacttactcgtccagcatcactaaaactttacacccattgaacagcaactccccatttcccgctcccccagctctggcagcctctatggtgtcatctgctttcatgcgtttgattacagatcctcatgtgagtggacgagtgccgtatttgtccttctgggcctggcttatttcagaatgcgtgtgcatgtggggagggggtctgcgtaccattacactgtcactgatgtggatgtgcaatacaggcctgggtccctctcatcttttggtagcccccccggctttttttttttgagactgagtttcgctctgttgcccaggctggagtgcagtggcacgatctcggctcactgcaacctccgcctcccgggttcaagccattctcctgcctcagcctcctgagtagctgcaattacaggcgcccaccaccatgcccggctaatttttgtatttttagtagaaatggggtttcaccatgttggccagcctggtctcgaactcctgacctcaggcaatccgcctgcctcggcctcccaaagtgctgggattagaagcatgagccactgcgcaggccttgataaccctattgttttacaaaatgaaagagtgcctgacagtacatgaatggtggtatgttttaggtacatgcgtgaaatggaggaagtctgtatagacgcagacacaccgcagtgcagtggtgccagccaaatccacgctcccagaagtgagacccaaggtgacagtaactggacccaagtatccccaagtctcaccgtctctgtgtgcctgtgtgcacagccctcccgggcataacgtcaagcgtatgtatttgatgtgtgtttgaggctgggtcttgccctggcatcagcagaagcaggccctggagcgcataagtgaccaccagacctgcacaccctctgcacagctgagcatctcggcatcaatgccctgtgagtgcccagggccaggtaggcactcaggaagcctgcaggccctgggatgtccagaccgcactttctggtaatcccacattgcccatcctctgcctctgcgcatcccctccccccttgcccccgagggcaccctgcctgcccacctcacgcccagccctgcccagcctgccctgccctcctcccgccgggaccacctctgctaaatcacttaatccggtgatatgtttcctctggcaggccaagcccatccctcctgactctcagggatttgattatagtgttttctaacaaagtcaaaaacagatttccatgagaggcttatagctcagtaattctatggtgctttggtgcagtgtgccaaggcgcagggatgtacggggtcaggatgtcgagagaaaaggtcacaaaattaaattagaaccaaggagggtaagccttggcaagagaggcctgtccggccagctgacaggggcatgcgccctggagaaccccgagaaaggggagttgtgaaaatgagccatttcacgcctaattacgatttcccataaggtacttaggagggatgatgtgcgctggacttggacaattaacgtaattaaacattcatgctgcctgcggcccatttcctgcctggggatatctttggaagctgaagcatttcttttttcttggaggtgatttcaagaatggctgcagaggaagggcttcctgcggggctgggccttgggggatgtacctctgcaccccagtggggcaggacccctacaaagagtgtttcttggtggcagctgggggcctgggggccggggaaggctggatgccactgacctggaattacctctccgtcgggaatgggcagcggggtctcatgtttgtggagtgggcagcagggtctcgtgtttgtggaattacctctccgtcgggagtgggcagcggggtctcgtgtttgtggagtgggcagcggggtctcgtgtttgtggaattacctctccgtcgggagtgggcagcggggtctcatgtttgtggagtgggcagcggggtctcgtgtttgtggaattacctctccgtcgggagtgggcagcggggtctcgtgtttgtgactctgcctgtgttttgatcacggccaagtcacttaagcccagattctctggcgtcccctcctttcctccgattctctgacagaagcctgtaaggacttccttggcttctctgggcctcaggttttctatgtgtcttacttgtggacactgatcaggacactgagggtctgacggagagagggtggcctgaccgaggtgcacagctggaggtgcctgaccgaggtgcacagctggaggtagctttgctgggaccagaacccagggcacttgctcacgtgctggctgtcacctctcaagcacaggccgggggaggagctcaggatccagccagactgactgagctgttctcaggtgaccgcacaccacagacttcagtgcagactggcagagcttcggctccctcctctgggaaggagcaccgggcttcctagctccagagttgtggatgctggatgaggaggccgtggtgaaggcaccgccccgggtctggagccccacaggagccttccccagatgctccgcaggcagtggatgtccgctggctttggttagtgttctgcctgccttaagggcaggcacagtcggcccagccgcgcatggtgggttctggggctgggggcacctccaggtctcagggcacctgccttgctgccgagagactgcatcaggcaggaggcaaggcagtggccggcataagagctgggccttgctgcagagtctccttccgcttcacacccacactggttttgggctatggcaggtggagcagggaggagccagggccccggaggtcttcaggctggggcaagtccacccccaattctgccctgctggctggagaggacaagaaaacaggctggtgcccagactgggttctggtggagtgagctgagtcaggaacagccctgtccgtgcacctggcccgttcctgtcacctctgtgggcctcaggttttctatgtgtcttacttgtgggctgtggccagcatcgttatgcctacttttcagatcaggacactgatctgtgtgcgccactgcggtgctctgcagctgattcatcctggaggccgcccacacctggggcctccggcccaccctctctctgtgctccagaccactcctgcctgagtgtctcatgggtgtctgtccttgtgtccccacagaaatctcagcccaacacgccccacacggccttctcctcctcccacgcggctcctcccgagggtcccttgcagggaaggcttcccagggtgaccggttgcccaggtcagaaacccggaatcctccctggccccactttctgcacccaagctgtgactccccctctcagtctttgtccacacgctgcctcccctgccttccaccctccttcctggctccctctccagccccaagccagggctgccctgccccctctagtctctctgcacttctgccctcctcccggcctcggccatctctcctctcctggccctccctccttggcacagcaggggcttccctcactcccaggccctctgcactgctggtcctgtgggccgtggtcaggaacacccttccccctctgcctgcctctcagccctccccatgagcgtcaggttccctctctgtgtctgggccctgcagtcctagagggcatctggggttgaggggatgctggtcctgctcactctgtggtcccagcccagcaggctcatcatcactcaaagggccccagctgggggccctgcagcccaccagatactgccgtgccagcacccagagccaggccaagcagatcggtgccagaccagttccaccccagatcacagctgggccttgactgtcagggtggcccccttcagctgccaagtgtagagtcgtcagggagcaggccaggctgggggctccctctgcccctgacccctgggggagctgctgggagagtcctggcctctcctgcatgtgcgtggcttgctttttggctggactaaggattgcagccatatgaaatgctcattgctgtcctcatccccctcccattggctgtcctggaactcagctcctttctgcagggcagccactgcacacctttcttctgtgtcctttcaggatgtcctgtgcacacacaagtatatatatatacacatgtgtacacacacatatataaatcctaggattagaatctctggctcaagggattttgtgtcctgtagatactgtgttttcgtttttctgactttttcctgcacactgtagactacaccgtgtgctaccctgcatttgcgattatcagggaacatgtcttggacgtcgtccacagcagcccctccagacctgcccattcctcctgctcaggcattccatcctgtgaatcacttgcttaaccagaccttgactgatggggacgttacttcttttcaccgtttcttataatgcagccgtggatatccttacacttatttccttggctacttgtatgaggacatttgtaggattaaatttgataactagaattgtggattcaaaaggtttgtgcattttcaactttgataaggatgaccacaaccctaggatggttggctggatccgtttctctcagcatgtacccctgatccgtacatttttatttggacaatctgatgcaggttgtttctttaattaagggtgaggtcgagcgtcttctcatacactgaaaagctgctcggtggctcatacccgtaataccaacactgtgggaggccagggtggatggatcacctgaggtcaggagtttgaaaccagcctggctaacatggtgaaatcctgtctctactaaaaatacaaaaaaaaaaaaaaattaaccaggtatgatagcaggcacctgtaatcccagctgcttggaaggctgaggcaggaaaactgcttgaatccgggaggcggtggttgcagtgagctgagatcacgccactgtactccagcctgggtgacagagactctgtctcaaaaaaaaaaaagaaagaaggaaagaagaaagagaagaaagaaagaaaggaaggaaggaaggaaagaaggaagggaaagaaagaaagagataaagaagaaaagaaaagctgctgtcttttcttttctgacaattgtcccctcatattgaaatgagagaagttctcttgtcctcctcgcagggcgtgctatgggggtgtggcttccttcttcagtgtccctctgctcaaacctctgggggagaatacagacgggcaggctgtggggctccgaccccacagcagtgtctaggggtgaatgtttgcagcccctgaagccccagtgggcgtgtgctgcatgtgctcttttactttagctgtctgtaggcggcttgtgttaaccagctcagttagaccctctaccttgtcgcaaggacagagggctttctgtatctcgggttcttccttgatgtcctggaagaatcagatcacacgtgggcttggagaatgagtgcgaggttttattgagtggaagtagctctcagcagatgggggaagccagaaggaggatggggtgcaaagggctttccctggagtcgggccgctaagcagcctgggctctcctctgactgccccggccaaactccgtgtcgttctgcttctgccggtcggtggcctgcagcgtgctggtgctcgttggtgcgttcctctcgacgtccagccgcctgtgtgttcctcccctcatgcgctcctctcgacgtccagccgcctgtgtctgcctgttagggtctcgggtttttataggcacaggatggggacatggtggaccagggtggtcttgggaaatgtgacatttgggcacaaaggcaagagtgcctgtcctcacataggtccgtgagggtggagcccttagccagggaccatgcacttccctgcttccatatcatttaaagggagcatgcccttctctacccagcacttttgtatcaataccgtttgtccatttcccttttggattgctggattgtttcctgttgatttgtaagagcgctttatgtattaaggaaattagtcctttgtctgaagcgcacatgatgtgggtgagcccttggctgtgcggggctgaattgagagtccatgagagggaggaggagcctggtgcgtgctgagtgttagttgccgtgtggataaccagggagtgttcctcaggcccctgcgtgaggattccaccataaaacacatccatcaggagctgtccttcaaggtgggaaagggatgtggagaaacaagtggggcgtgaactgcggcccgggaagcttcagccactgtgaggcagaggcaggtggactcactctggttggccagaacctactgtgctcaaaacctctccaggccagacggaggaggatacagggaaacggttgctcagggcgtggagccgaggtggcagacagacctgaggacacagctttggtctgggcgtggagctgaggtggcagacagacctggggacccagctttggttcatttcacaagcagcacagcacctacattattcttaaattgctttttgccagtatttagagatcagagacttcacatgcaaatccagatttctcacttccttacaaaaataagacccagcaacatggacctgcaccctcctagtcaccactggccaccttgggctggaggcagtgtgccctctcatccccctgcccacatggcttttctcacgggagcaaaatatttctcagtgaagagggaataagcaaaagacaagccaagagggccgcatgctccaaggaaaattgggagagtatatttctttctggaaatgcagaccgtttctctctgttcaacatgtgaacaaaatatgtctaggtcagagagatggggcatcgggaaacacgcccagcctagcagggacccacaggtcgagggtcagggaggcccgagtgagaattgctgtggtgtgaggcctgcggccggcagcgtgttgtcaggatggcgcctacggatgtcagggtgtgccgggagccatggcgacagctcccaagaaaaagaggagaagacggtggtagcgtgcacccaccgcatggctgcagtaagcgcacagcatccacctgccccgctgacctcacgccgccctcatgctctccctgtaaatgacggccaggaaggaaaccgatgtagactccacggccaactgctcccaccaaggagatacagacaatccgcccgcatccacgctgcgcctcgtcctaccctgtcctgtctccacctgctcagaagtagcataaggataactaagttttccatttatccaataggcgtttttggcccgtttatttattcattttgccaagccccatgtgggtacctggggacttagagaggggtcaagggccacctcagtcttccaggagttcactgtagagcctgtgtgtgcatgtgcacgtttgtgtgtgtgcatgtgtgtgcctgagtgtgcatgtcacatatgcacacacgtgtgacatgcacacacatccatagactcacatacacgcacatgcactcacatacactcacatgtgatgaatgtatgcatgtgcgtttgtgtgcatgtaagagcattcgtgtgtgtgagtgcattcatgtgtgagtgtgcgtctgtgagtgtatgtgtgtgtgcattcatgtgagtgtgcatgtgagtatgcgagtgcattcacgcgtgagtgcatgcgtgtgcgagtgcattcgcgtgtgtgtgagtgcattcgtgtgagtgtgagtgcatgtgtgtgagtgcattcgtatgagtgtgcatgtgagtgtgagtccatttgtgtgtgagtgcattcgtgtgtgagtgtgcgtgtgtgagtgcgttcgtgtgagtgcatgtgtgtatgtgactgcatgcgtgtgtgtgagtgcattcgtgtgtgcgtgtttgtgagtgtctgagtgcattcgtgtgtatatgagtgcatttgtgtgagtgtgcatgtgtgtatgtgagtgcgttcgtgtgtgtgtgtatgagtgcattcgtgtgagtgtgcatgtgtgtatgtgactgcgtgcatgtgtgtgtgtgcatgtgtctgaggagtgatcactgagcaggccagcctgtgatggtgacaccccagagcgctctcctagaggtggtgccacgcaaggctggcaaatggtagttagcaaaatacttgacgagtgaatgaacaatgaacaaatgaatgaaaatgaaggttttgggagccagagaaggagacagtgacttgtcctggtggagggcatgggcccagggcaggcaggtaggaactgttgcaaacaggaggaaagtcaggctggacctggaagcagggggaggggttgcctggcagaaagtggcaacaggactgggtgctctggggagggtgctcctgccctgggagaagcatgctggaggttcggaggcagctgggccctgcaggggctgctgccagacttgatgccctctcagggcttggcaggagtcagttcacaacatgcaatgctgtgatggcagccacgtcacctctgcagggcaggcaggagcacatgggcagctggttgggagcacaggccagagggccacccacccagcccatctcagtgagccacaggcctgccgctggctgctacctggaagggtcacaccagcttttaagcaagaagaggaaaccccagccttttaaagtagaattaggatgatttctatagtttctgcccggccagctgctggtccagtcttctgagcccttgcagtgttgagggcagctggggcccggcaagcagggcctttgccatcctctctgcaggcagggtggccctccctcccctcctggttctcagggtggccctgggatctgggcttgtagtgcatccctgccacctgccccggttggggaggaaaggccctgtgaggctgccttggggattaaattttcaggactcagcactcactctgatttctgatttcctcccttctcgaaatagggctgatcaaattaagcctcgtcaacaccgtggtctgggtgctgtgtggggagtatgaggagccccttccctcctcaactgcagctgggatattctagggcaggaagcatcatgggacaggagtgtgtggggtccaccagggccaattgtcaccacccccaaactcaggcttctggacccacggagttcacacaggaagacaaatgggaggaacccccgtccctgcagggttggatggcctggcctctgggctcagagtggcggctgcactgggggcctctcggtgctgtctctgagtctgcaccttgggatttacccgtgggagaggcaggtctgagagaagatcccacagccaggcgtgaaggacaggagagaccagaaacaaaggttgggcaggcctgctcctcagccccatggggggctggagcagagggaaggaggacatgtggtttgggggcccagcagcctgaggggaaagggaggtccctgacactcactgggagagagggctgagggtctggcaagttccagggtcttgagctgaggggggcgtggtgagcattgcatcacctctgcggggggctcttctctgggcagatccagggagcctggctgctgcccgcccacatggggtttccctgccccctcaggaggcgcaggggcatgggagcgtcctggaggatgggacatcagggcatgggagcatcaagaggccccaggcctcaccacccttccacccccagcatgggggagggctggggtggtccccggggttgtcctcggtcactcctgctccttgagcaggtcctggtcagacatggactgtgcttggtgccacgactgaaagtggggggtctttgtgcccaagggtcatggtgggtgatggcagcaaggtcctcagctgggccagggccctggtactttcagctccctcttggctgctggaccaggtgcaatcaccaccatgggccattggaagctcgggatgcgggggacagagccagatgctggggtcacgcaggggtgcctgttgcctgggcccagggcttgttccctcatttgcgtaagagaggtcccgtgcccactccaccggctaccatgaagaagaaacaggaggtgtgtgaagtccctggtgcctgggcatctgaggaactcttcctcctaggaaggcagcttggtggcacagtgtggcccaccgtgcagggctgccccaggtcccacaatcagctaggaagagcctgtgcttggctgcagcaccccagcactgctgtgtgcctggactcctgacctagaggggtcaggaaggaggagggagcagaggcaggtgctgagtccctgcacgtggctcatggccgggtaggagagggcctcatttgcacagggtcgggcagcatctgagacctcccgcttgtgttggctgcaagctcttcccaggggaccaggacctcacccctgcagggcccacgcccaccctgcatgaacgcagggctcaacatcaaaggacgtgaaggccacaacaagggaaactgaggttggcaggtaaagaaatgccttggaacttggatttgaagagtgcagagatgggggaggcgcagatgctgctggagtcaggagcgtgggcagtacagagggcatagagcgtggaggggtaggttccagagaccctgaggagtgaggagggagctgcctttgagggagggggagaggcaggttctgctcctggcatggacctggctgcatgcgggccccactccctaggtggacgatgcagctggcagtgcagccggaggtgcacgtgcgggcagaggaggcagcaggccctggaccttctgagtgtgaggtacctgaggccttccggggagcaatgccaggcttccagatgatgtccaaatcaggggctctggagcatgtaccggactggtgacagggattttccgcctgtcatctgctgagccactggccaagcctccggccacatgggtcccgtggcactggctgtcagcaccccacttgccggcccccacctcctctgcgttcagaacacaacccctgggaattctcccttcctttgggacccgtggggatcttcgttttgttctgaagttcacagtgaatattttcaataaaagacctgccggcctctccatcggcccccaccacttggctgccgcgtgctgcggtgcccccgtgacattacccaggccagctccccttccctgggccaactgcccagcagagggaaggcttggagccctgggggctgtggtgagtcctggggaccctccctggcttaagcagatgctaggcaggggcagggcttgctggctcttgtcacccgccccagcctctgaaggccccgagacccccgtgaatccttggaggtgagtgggctgcagaggccgctggagagtggcacggggcaggtgcagaggagcctcggtagttcggcgggtgctggggggacgaaggggaagttgtgtttgggaacctctgtgggggctgtagacaggaggccccagccctggggtgaagagggggaagttgtgtttgggaacctctgtgagggctgtagacaggaagccccagccctgctgcaggacacctcagaggggctcgcacagctgctggtcactcagcatggccctgctggcttgggctcaacctcagcagcctcacacctctgctgggcaccatttcccaaggacacgtatctgggagccggaccagagcctggccccttttctggtcatagaccttaaatactgcagaccttctcctcgccccacactgggaggtgcaggcacagggcagaagagagtggcctggtctgatgcctcaatcgttcaagagagctgtggctgcaaagccaaaccatggtgtctctctcaggccagcacatttggctgtgtctgtgtttgtaagggcacacaggactctcgtggttgcaagagacagagagctaaatgaattgacctgaagaattaggatgtccaggggtgcatcaccttcagccatagctggatttggggacctgaacagtgtcagcagcacacggggctgccctcatctctcgcctctgctgctcctgggggaaggaggtacttagcagtcccagagtcacattttcccagcagagaggaaagcacgggagtcttcctgtgcacaccaacacacagcatcaggttccagtggcctaacaggaccccttgggcactcctggagctggggtgcagtgggattggctccccatgagccatatggggtgcaaataggggagggtggtttactagcagaaaaggtgtaatggccagacagggcaggccaccgtgctgtgcaaccccaggtggctctgtgagggtgtgcaggtgctgggcaggccaggaccttctgtgtccaccactgaggggtgtcctttgtcctctgctgtgcgggggtatgttctgaggactggcccggagaggccttctctcctttagtgcttcctttttctccctgaagcatggctgaggctgagcaggcctgggctggagcgtccatctgtccgcggggcagcccatcccgtgggagtttagagaactgtcaggactgcccctgagattcggcacagcggttcctgatgcgctcctgatggccaggccggccccaggagcccctccccaccctccgatccacctcaggtcataaaaatggcattggatgagctgtgtctgttgaagttgcaaaaattaattcaaagtcagtaataaagttataaagggctgggatgtaataatcctaatgagcatcttttaataaagtacaccagtggggctctgtgctgatggcccccgtggggctgagcctgccttctgcttcccagagcctccaaagagcctgcctgcttccaagcagggctttctgctgtgtcctgattacacttccacataaacatatttcatcttaatgattatctttaggggaatacacagccacagagcgactctctcttggttagtaagaaatggaggggatgaccttgttcccgttgacctcccctgggtggggctcctcatgttggaggagaggctgctggtgctccaggctttggtcctcctgagcctggtggtggcccctgcaggccctggcagtgcttgtgtgcaggaactgggctggcattctggcctggccatttgccaacatcatggccttagtctaattccctgagcctccctctcctcttctgggcagtgtggcagttctggctctgcagggcggtcattaggacttacgttttggggactcctaagcactggaaaaaggatgacttgttcccatccacatggttggcaggttgaggcagtagcacagcacctctgtctgtgtgcaggtgcctcagtgagtgtgccgtctgccctcaggccatcccctacctagtgagtgtgccgtctgccctcaggccatcccctacctagtgagtgtgcctgtctgccctcaggccatcccctagtgagtgtgcccatcccccccttgcgccatcccctagtgagtgtgcccatcccccctcacaccatcccctagcaagtgtgccatctgcccttgcattcagccagcagagtccagcagagtgggaaactgctcacaggggatggggcagctaaggagagggctgggaaagagccctaggcttggaacccaaagcccgcccaacagcaagatgataaaaaggtgcctcgctacattttcttctagcacttccatgacttccttttgatcatctcatccacttggaatctgtttttgcttaaggcatgaggtcaaaatttgaccttttcctccctctaaccagttgtcctaacatcattaaaacaaagaaagaaacaaaagccatttatctccccagcctgctctcttccttctgattttctcctgcagtgagcaaccatttcaggtgatcaaaccgtatcctttccttagtgtacatttttgcaacatgagtgttgctgtcttgcgtctgtgtatccataatttatgtaagtcgctctgaattgtgtctcattctgtttcttaccttttgcacttggcactctgtttttaagatccatccatctatgtagatatcaaacttctaaccttggtagcactttgtgggatgcccccaccacatttgcttctcctctcacccactgatgacccccgtgttgtttccagctcccctcactccacccaagcaatgctgcaaggggcagctccccattgcctccttacagacctgtgcaagtttgcccatctgcaagccagtccatggggccgaacaatggcccatgggccaagggtcagtccaaggagggcactgggctatccgatagacatcctgtatctttaggatatgagccgcatggtgctcttcctcatgatcccctcagtagtgccagactgccaggttgtcccctcctgctccacctccgccgtttcctagcaccgtttgctacctgtatcatttactaattttattcactgtattgctacttgagcaactatttataattacatgcaaatgaatatcaaagacgattaatattaaagtggagagctggcacacgctggcagtgtaaggagagggcggcactgcccccgctggatggaggctcccggaggtgagcagatcagtctccaggtcgtggtctgacttctgcttctccgggaactgacaaggcccctcctggggaagtcgtgagcaaggtctcgaggaagtcttgggctcagcacagtcaggcacctggtagggcccaggtggggaccacgcgctggacctgcagcggaaatacggtcagagggagggggctgacctgtacgtcctgcttctaagctcgccacggcctgcctccagctctcggtggggggaaagctggaaacttctgtgaatgttgtgcgtcctcagcagaggaggggagcgcccctcatcggcacatggccaagccaagtactgccaagaacctaggccaggctctcctgggcattttgtccccgggctacagatggcctgatggaggtggggtcttggtgaagacagttcaccccgtgggtcacgctgctcagtatggctcagtcgctctccacatctggtgcagagccatcacctcagggtcacttctcgccaccctccatgggcctcccaggccatgtcttctgtgttgggctcccgttttctctatctgtgttgggcttccgttttctatatctgtgtcttactctttctttgttgccttttttgtttttgatggtgcacacctttcagtagcttcttgagaggagtgcttgtcacataaatcttttgagaactgacatgtctagaaatgtccttattccactttcatacttgatggggaatgtgtctggatgcagaattccagttggacaatcattttccttcagaattctgaaggctttcctccactgttttcctgcatcgaatgctgcttttgagaactctgagtcattctgattccaattctttgtctatgacctctcctgtaacctgattttcccccttcttattctccgggagactttgtagaatgtggctgtcttcatggccagcctgggattcagctttcttgatgtaccaagtctgttaccacttgcccatctgtttccagcctcccacagttcccttgttgtttcttcccctcctgctctgcctatccttggaggcttgtgactttaaattttttttaaatttctttactgaacttttaatgggattctagaaaggagccaaatcagatatctgtgttcaatccgccattttaacctggaaaccccacatattcttggatctgtttttggaagtttttttgttttgttttgtgtttttgagacggagtttcactcttgttgctcaggctggagtgcaatggcgtgatctcagcttaccacagcctccgcctccccggttcaagcgattctcctgcctcagcctcccgagtagctgggattacaggcatgcaccaccatgcccagctaattttgtatttttagtagagatagggtttctccatattggtcaggctggtctcaaactcccaacctcaggtgatccacccgcctcggcctcccaaagtactggaattacaggcgtgagccactgcacccagcctgtttttggaagttttattcagctccattgatctgtttctttcatgacattgacacaactacgttttcattaatattattttataatacactgcattaatttgaaaaaaatatgcctcctcattgtcattctttttcattatttttctgtctggtgtggtcttccggatgaatgttggaatcactttgttgggttttaacaattatttgatggagattatttggcggagaataattttaacaattattttaacaattattcgacggagattatttgacagagaataattttaacaattattcgacggagattatttgacggagaataattttaacaattattttaacaattatttgatggagattatgccaaatttcttgattcatttggaggaggaccaacttccagtccaggattatgtccatgtagcttcatttactgaggtcttcttttgtgtttttggagaccttagactatattatactactttttgtgtagtcgttgaacattcattagtttttgtttgttcttagatacttgggagttttgctgttatagctgataagctcttttttccactctgctttcttgcgggttattcctatgttcaagaagtcttgatctttgcattattttatgtgagatgaggagtatctgttccttgtggatttggttaaactcttctatggaagcatttctttgactgctctttcaatttcttctgaggttattggtttcttcaggttttctacttgagccatgagtggaatgtatattttctatttagtctaggcctattagaatggtgcttttaatttcagatgtttagggtttagggttttattgttatctctgattttgtctcagtaatggtgattgtgggcacggcttttgagttgtgtcctaatgtgtctcagtaatggtgactgtgggcacgatttttgagttgtgtcctaatgtgtctcagtaatggtgactgtgagcacgatttttgagttgtgtcctaatgtgtctcagtaatggtgactgtgggcacggcttttgagttgtgtcctaatgtgtctcagtaatggtgactgtgggcacggcttttgagtttttgagttgtgtcctaatgtggtaaaatgtggaacttctcccgtgtgtgcttgacaaggtcacgtgttctggctgttgggtttgaacgttaggttttcctattaattcaaatagtttctatccctacctaatgctgtatcagacttgtctggaataaatgtattacagtgctcctatcactgtggccttgtctctccttccttgcaccaggttgaagctttaggagcataaagtttcgtatcttttgtatttttttccatgagttgtttgttttatcagtttatctccttaaatgccttggttggcaattacatggtacgtttctttgccccacttgttttaactcctcctggtcatttggacttggttatgccatatgcaagtaatttgtagctggattttgttccatctcatgcttctccaactgccaccacacttttgctcctgttctcggctccccacccccagtgtggcccctccggccctgctgcacctgcctctccttctatcccagttcccaactccccagaggcccccagctcgcctctgctgggccctctgttcccagagcacctctctgccatggctccaggcccctcacagccctgcggttacctgtggggcactggggacactgaggcacaccagaccccatggtctccatcccccagggttctctatctgagagggaaagtcagttaatgcccaggcaaattcacaaatgagacaagacctgcctgcagtggagtgtcacaggaaggaagagcacggggtgctgtcgggagaaatcaggggagggctgatttcaatttgggatgaaataaggaaagttctcccttaggagctgacatttcagcagacacctgaaggaagagagcaatgagggggcggccatcccatggagaggggacagcagtcggccgtgtcactgaacagtgtggtcctcaggttttaagcatccctgccccggcccctgtccctgtcgtcccctagtggcacgcagtgtggctgtgcaggaggcagatgggggcagaacatgctcctgtctttcaagagctctgagtcccatgggaggcagcgggctcccttccttctgggtctttcagggggcctaaatttggccagcacagcggcagcagcaaaaagggcatcgcaggtgaagaggccagcccagaaaaggcataggactgagcttcgcacaggggacagcgaacacccagccacccttagcactgcaaagcccctgcctgacctcagagcccacacctgcccactgcacttgccctcagcccacacctgcccactgcacccgccctcaggcccacacctgcccactgcacccgccctcagggcccacacctgcccactgcacccgccctcagggcccacacctgcccactgcacccgccctcagggcccacacctgcccactgcacccgccctcagggcccacacctgcccactgaacccaccctcagggcccacgcctgcccactgcacctgccctcaggacccacgcctgctcactgcacctgccttcggagcccacacctgcccacaaagcccgtgcctgcccactgcacccgccctcagggcccacacgtgcccactgaacccaccctcagggcccacgcctgcccactgcacctgccttcagagcccacacctgcccacagagcccatgcctgcccactgcacccgccctcagggcccacacgtgcccactgaacccaccctcagggcccacacctgctcactgcacctgccttcagggcccacgcctgctcactgcacctgccttcagagcccacacctgcccacagagcccgtgcctgcccactgcacctgcccacagatcccacacctgcccactgtacccaccctcagagcccgcaccatcccacgatgctcccgaggttgcagactcagtcccaggttttctcttctctagtctaatcatacttgtttctacaattctcattcccgcaaatcacccctcagtgctggtgaagtacagaagggctccgggcatgtggacaacgttggactcagaggcctgggcgcgtgcccactcctcctctctggtggtgtggcttgtccgagtcatgtaattttcctgctccttggtttgtttccctgatgctgaaataggacgatatgctgatggtgacacgcctccaccttggcgaggggattggatggctgctgggggtatggagctgccactgtgaagggctgtgcacacacccctgcctggagactcggggtgtgcctaggatgctggcagttgcagcccttgcccacgtgccctgtgcactgtggcactgtggatgagcccgtggctactgtgacccacccgttcccctgatggaattccctggacagaactgctgcctcccctcattccatcctctccctgtttattgattgactcttcgatagagtctttttgttccattctagagactctaaaacaggatggctctggagtgcttcccacagtgtcattatttggccacgatgtgagcaaagagatctccagctgccatccaaaaggggccctgagcacagggaatgccaggaactcgaaagctctgtgttacctatttaaaagatgggatcctgccacagacacctcccttcagggtagctgcagcccacctgggtatgacttctggggcttggtcaatcagcacccccagggggcccagtgccttcttgtggggaaggctgcacacagaggaaaggaaggccaagggcagtgtcatcctcctgcctctgcaggagatgggtgcgctgatcactcatccaggcggggtgagtgccgagggatacagcagaggctgtgtgagctcccagtcaccacagctcagcagggctgggctacacagggagctcccaggggaggaggggagagcagcaaatagccctcttctgccttggagggaccaagtggaacaggggctgttagaccaggtaggcaaccagtgcaggtgggcaggcccaaggccaaggttgacttcaaagggatcactaggaagacgactcaggaccacgccaggcccactggccagagctccctatagcaaggctctatttggggaacaggtctgcaagggccagcatgtggtcagagtctcttcatggcctgggttaagcccaatgtgggaaaaactgaggtggcactcgtgattgacagggtcagggtcaatcttattgtggggaaaactgaggtggcactcgtgattgacaagctggggcttcagcctgactgccgggtcttgttgggacagaggaggacaggaggggggctgggccagagctcctgttgccccaggtctgagggcattgcagatccccctgctcttagggcttctccccttgtcctgtccagcctgagcaccactgaggcttccaggggccagacgcagggcgtggctgtcacctgccaggtggcccaggcccctgtcttcctctcctcacccactttgcctttgggccttgggccgtctctctaggcactggtcctgggtggagggatgctctagaacataatttccaaatttcaccccaaaattatcacgattaaaataatgatggcaacaataataattccatttcaggtgaaattcagattctaaatctttagaaacctttgctgtttttaatgggcttgcaacacacagtttagttaaaaactctgcctgctcggcagaagcagcctcaagacgtgccccagcccagctctgtcccgatgcggcacccatgccctcctacggggaatgtctggaggggtccctgcatggggactctggggttagggccaggaggacatactgtgataccttctggtgccagaatgacattgacagtggcaggcaggtggcctggtgagccaagccctgtgtgttttgtctccaggtgtggcccctcaattcacagacccgggctacccctggggtggccccatctcttaattcctcaagagaagctggatgttctagatttttaaaacatgaaatctcccagttttcaaatactatcaaccagatggcaccacgtgacctcaacgagtgcctctgtggtctggttttgccgagggcaccgcccgtgtgtgacccctagtttgacaagggcagagggtaacgcccggcctgttccccagggaggaagagttttcctatggaaattgccatcactctccttcccaaggtgattctgaaggtgagctgtctctgttcgttggaaatgcaaagaaataaatgtacaaaaatagagtggcgattcctcaacccccctgtcaggcttgagttgctggcgcttcctctgggaacggcatggatggccctgagtcatccaggcagctaagtggactgctcggctccccacagccctgcccgcaggcctgccggccccacccctgtccctggagtggccctggaaagtccttgctgtgtacatgcatgtgtgtgtgcctgtgtgtgtacatgtgtgtgcatgtgtgtgcttgtgtgtgtgtacatgtgtgtgcatgtgtgtgtgtgtgcatgtgtgtgtgcgccgaggggacacagaactgtggagctgggggtggcacaaggacccccgaaggtactggaaccccagcagctgctcagccctggccccacttactcctcttctctttcccagccctcaccctccgcctcgcacctccactgtctgtcttggtcttgcccacagccgggctgcaggtttgtgcctgaaacttcatgttcagtctgtcttgtctgagccaggctgcagggtgcaaggagagagcttctggccgagagtcggccatgctgggatgccatgggtctccccatctgtaaaacggaaatggccacgtccaccgagtggcctgctgtcagcactgggtgaggaagcgtgtgccgggatgagggcctggtaccaggctgcctcactgtccgagtggccgtgccgcctgcaggggccttgttctgcctccagggcctgtcctgggccaccctcacagggagggagtgcctgtccctgcctggaagaggcagcaggagagaggcgttgggggtgaaaagtgttgttctggaagactctttgtagagaggtggtgcagcagggacgctggtctccctcagctgcaggggcctcggggcctggccaccgccctgtgggtcagtgatgtcacgatgacctgcagccctgggtctgtcccgggccaggagtctctgaggacctgcctggggaatgccatggagaccctggggctgggacctggcttagacacagagaccagtgcaagggaaagggggcttccaggacactggggcttggggggcggtgggcagtgtggtctggggctgccatcgatgctgcaggtcagcctggccagccttgctgtggccttcagacgggcagtggagggctgggaactgaagcctggtccagggtggtctccaggcccgcaggacacagaacacagcagagacagcactgcacagaaggcagggacgatatccggggcagactccccaggatggcagccccaagtggccaggggcacaccctgggggcaggaggtcagtgcctgcccagggccgactgcagcggagctgccacagaggggttcatcttggtctctgcacaattcaatcaggccagaggcggtaccgttcacctggggagggggcccgggacctggcccagagatgtggggcctcgcttcagtggaggacttagcagaaagttctgggaggggcccaaggagacactggggaacatgcacagcccaggatgggcctcggtttccccagtcataacagctggcgatgacacctgggacaccagtcctttggcacctggcagcccttcgggggagaagaggtggctctacccactccagcatcgggcagtgtgggcaaggggtggctctgcccactccagcgtcaggcagtgcgggctgaggttcccgacctctccatggctgaatgccagccctgggctccataaggcagacggtgatgctgggctgggtctctcacagtctcagcaggtctgatccatcgtgtggaggccactgtggcccctgctgtggctggggttgccaccaggggctggggaacgagcggtcctggaagtcacagaggtgcctgtctgggccctgctgtgtctgagacagcttggcaagtctctgccatcttcctctgcacctcgctttcctctgtaaaatggaataataccctcggttcagggtgctatgagttttaaatgagaggatggccaagctggcgcctggtaggtttgtgtccgggtgggtttgccctgccgctgaagacggtgtcctctccttgcaggggcctccctggacagcctggacagcctcagccgcgccctgggcgtcctagaggagcacgccaacagctcgaggcggagggcacgcaggcatgctgcggacgatgactacaacatcgaggtcctgctgggcgtggatgactctgtggtgcagttccacgggaaggagcacgtacagaagtacctgctgacactcatgaacattgtgagtggggtggctgagggggcagggtggggcggggagggtcaaccaggggctgggcaggccagagaggcccagctgggccaggtcccctgaggctctgccgatttccttgttagccggaggtgagtgacacagtctcagggaggcttgctgggtccccaggtgagacaagttgaccatccctgacctcagttctctcgtctgcacatcgtgggtgatggtaacttggtgaggctcttcacaggctaaggcgggtttgtgcaaactccagtcgtttgaatgacaatgtcattcaatgtcccgtcatttgaaaaatatgttttcttgatgtttgccacttttaaaactaaaatcatttaaaaaggcaaccttattttacctgaaaagctaatataatagtaagacataaagtgacgttattcagccccagctggatagccctgccttcttctcgctccaaacagaagccccttttctgtttaaagtagagattcacgtgcattagagcgagggccagacaccaacccagggcccctccttaaagctcgcagtgggaggaattggggagggaattcctttctccctgtgagtctgggctattgaaaggggtgtctatgtgccaccttcgtcttctgggcacctgcccatggtctgcctaacactaagagattaaagaaccacctccccctcattccatacccccaacaacctaagcaggaggtgccaggatgctgaaccgtgtgtgggtggaggctgtgcagacctttcctctctctgcctcatgtggtcagagccactgtggggatgaggggcgtccagtcttcaaaatgcaggctcccaggggagcagactggcttggctgagtcctgcagggaaaagaagggggtgagaaggaggaccagggcacggcctggaatgtgagatgctgccagtggggccctaggggcaggggggtatttgtgggaggaagccggggcttagggagggctggaggtggtgtggaagccgggcaggtgggaagttctagaaccccgtgctgcgtgtccacacctgtggatgaatgaggtcctctggggccgggctagaggcaggcagcagggtgtgcaggtctgctcaggatctgctgcccagctctgcttttcggaccaggggtgagcccctccaggagccaagctgacacatgggtcagagtccccagggccctggtgaaaagatacctcaggggcaggaggggatgtgagtgagctgaacactggacagagacaccaccttcatgctcactttcctcttgaccggtcttgggtgagtcagctagccctctggagcccagccttatccgtacagggggccgaagtccgctgcatcggcagaattcgttttatttgggagagcgttgtcacacttaccctcatcttatttttgaaacgtacctttaatgcaataatcataataacggccgggtgcggtggctcacgcctgtaatcccagcactttgggaggccgaggtgggcggatcacgaggtcaggagatcgagaccacggtgaaaccccgtctctactaaaaatacaaaaaattagccgggcgtggtggcgggcgcctgtagtcccagctactcaggaggctgaggcaggagaatggcgtgaacctgggaggcggagcttgcagtgagctgagatcgcaccactgcactctagcctcagtgacagagcgagactccgtctcaaaaataataataataataataataataataacaataaaaccataatggctacattatcgagcccctactatgtgactgtgccgggcccatgctgggcacttgccatgctaaattatcttgggaagtcctcatgctaggtctgtgagactggcaggtataaaatcttggctgccttcacaatatgagttcttcccctagcattatgtcgccttccaacccagcggggaaaggactgggcttggaattacagtccgatggcgactccaggcctcgccttttccaggcgcgtcgttgggaacgctgctcccgtcctctgagccttagttttctcatctgtaaaatgggccagtgttttcatcgtgggggttgatgtgattacatgagataatgtcagtgaatgtgcttttcagtctctcagtagggtgaacacgttttcagtttccacataaaatgtggttttgttatcatgacagtggcactgtttagtgacagtccaggaggggtcacttctgatagcccaccaagggcgctgaccaaatgtggggcccgtggtgagtccttcatgaggctggcagaggcagatcaacctttctcctggtgcccagggtctctctgtcacaacagctggttggaggatgtctagaacgttctctcacttttgccgtccaactttattcaaaccctagtgatccagccgtaccccctattttgaataatgggaaggttcgtttctagaaaagcatgagaaatttaaaaattcttaaattgagatgagttttatcacaacagagaaaccgttttaggagacaagtctcagaagttgagaaagtatttgggccgtgtctgttgtcccctgttgcacagaagtgagcactgattcattcagcaaacgtgttgacagtgtgcttgtcatgggcacagtgggggtgtcctgcagaggcggcggggcgtggcagagagtcccggggcgtgggagaccggcggcggagggtcagcggggggtctctgcctctgatctgagccccagctcccactgcaagagcgcagcgtgggcgagggagataaggcgcggccgtgcctggagcatggcattgccctgacgatgaatgccctgcgtcctcactgagagcctctgcatgcccggagagtcctgaggacagatctaagctatgtcggaccctttggtggtcttggggaggaggggcattgagcaagtgggagcttctgagaaagggtgaccttccagagccctgctgtgcgacagagcttcccgcggtgctggggagatgctcgtctcgccctttctggggcagtagccaccggggctctggagcacttgaagtgtggctggtgtccttgaagaactgaatttttaatttaacttcttatttgttccaagagaattttaatttaaaaaattttaattgcggtgaaatatacagaacataagtcaccgtcttcaccatttttaagcgtgcgattcggtggcgtaagcacattcatgtggctgggccaccatcgccaccaccgtccacagaactcttcatcttgtaaaattgaaactgtgcccattgagtttcagccctttcctcccctccccccgactcctggcacccaccactccactttctgtttctgagaatttgactactctgggtacctcgcataagtggatcaaacaataattgtccttttgtgtctggcttatttcacttagcatgacatcctcggggccatccacattgcagcatgtgtaagaatgtccttccttttcagggaggaccagtatcccgtgtgtgggtggatcggccacattttgtttatccagccatccatgggcactccggtggccccctcatgggctactgtgaatagtgctgccgtgaacgtgggtgttccagactctgttttccgttctcttgactatatgcccataagtagaattgcgggacacagggtaattctttctttaattttttgaggagtttccacgctgtttcccacagtggctgtgccattttgccccccaccaacagtgtacagggattctagtctctccaaattgtcaccaactcttgtcttttttttcttttttacggtagccaccccgaagagtactttgtttggattaattttcacctggatggaagccgcagtgtggctggcagctgctgtgctgaacagggcagggttgggcctgtgcacagaggatctgcctaccgtgccctgtctctgaacttgggtgctatgggggcctcgaaccacaaccccaagtggccctctaaggcctggccagtggcttgtcacactcctcttgtaagtcccagctggtcacagggctccccgtggctggagcgaaagcaaaagcatggaaggacagacgtggcagcagccggctgggactgggctcccagtgaggtgtttgtctggagctgtagagcaggtggggctgggcaacggcacatccagagcccggggtctgggggccagccctgggcaatgagctgcccactgaactggatgcagagaatggtggcacagcctgtgccctgggaaaggccgtcgagccctgggaggaggagctggtgggggccctgatggtggggacccagggaatgcaggctctgaggaggaggtgaggtggtggcaggctgagtgcaggcacagctccaccctggcagccctgcactgcctcagtttccctcatcatttggggtgacttctgcctgcagagctccctttgggatctctttgtggcagagcctgggctgggatatggggtccaggggtggcacaggcagttcagcctcatcgatcacccctgtgctcccctccccagtctcccttgtagctggtgtggagctgcatggccagttttgcctagtggcctgtgtgaaaggaagtgacctgggtcacctgtggaccaaggctggtaagagcttggagtcccctccatctctgtctcccctgccacggaaaccttggaagccatgtgtcccagtaggtacagctgcaacataggctcgggccctcccgacccaccccgcgccatggtgtgagtaaggaaacacggtgtgcggtgtattgtgttcagctgctgagatggggtggattctcggcatagccatcctcctctgtctggtgcccctggctgccgttcatacgggggccggtgtttatggggcgtctattatatgtcaggcaaggggtgcagctgtgagcatgacaggacgtaaccctgctaccttgcattctgggaagggaggcacagacgatactgaagtgaaaaacaaacaggatcatttcaaataatgacaaatgcaatgaaagaaataaaatagttaggagatggagaaggaagaagggtaggggaaggcaggccactttctacagctcaggggctggtgcactggagatatcacgggagcagaggctcacgacaacggaaggatgtgggaagaggtaggatagggatcgcctgttccaggtttgggggagggggcaggcggcgccaaggccctgaggcaggaatggggccggctggaagaatggaggcagcctggcctgtcaagcagggggcacaggtaggggaagtcggggccggcaaggccggccgccgcagtcttccagaggtggaggggagccgcctgtggctccgggagcagtggaaatcactggaggggctgcttcctgtctatgttaaagacaagacgtgatattcccttttctatgggaaagatgaagctgcccttttcatctcagacttgccagaagggaagcggcttggaaatggagcacttcatgaggccacctgggcacagaaaggggctctttggtttaggcaaccacccacctgcccactccagcagcccctgctgggtccagttttcttatcttcctccttacatctagaaaagcatgttttttggtttattgaaatagtccatatttaacacagatgatttattttatttatttatttattgtgagacagagtctcactctgtcgcccaggctggagtacagtggtgtgatcttggctcactgcaacctcttcctcccgagttcaaacgattctcctgcctcagcctcctgagtagctgggattacaggcatgcaccaccacggccgtctaatttttttttttttttttttttgtatttttagtaaagacagtggtttcaccatgttggccaggctggtcttgaactcctgacctcaggtgaccacccaccttggccttccaaagtgctgggattacaggcgtgagccaccgtgccgggacattttttttgctatgtaaaattagcataaattcctgtaggtatgtgaatgtcttctcccagcagttaattgtctactacgttgttttaatgattgcataacatcgcaccatatgactgtcacacactttttacctaacttattatttatatgacatattcacatagcaaaacttatttctccattagaggtcagacatgccactaactgtatcacgttcatagagttgaatctatcgctcgtgcttacttatttccttaagctgagttgctgaaagcgaagtctctggccaacagatatgcccattttttaagctttctacactggaatgttctctgttatggtttcatctattcccgcttcattgagcaaatgactgtctccccacctcctcacaccactgagtccttttgagcagtggtaatttaattacaacggagataagtttttttgttgtaagttgttatttccttgatgttaatgagcctgcatttaaaaatatacgtgtatttgtaaacagagattattttatttttttgcttggcctattcatgcccttgattctgctgggatttgggggtgttttattcatctgaagagtctgtgtacttaagtagataaactttttgtctgtcacatgtgtgggaaatatttcccccagtcctgttgttgaccttttgttttattccgcctgggatagtttttgatgtcctacatttttgtgtgtgtgaccacagggaaagatcctgcagtctttcccttcccaggggaaaagcttctcccttgggtgatgtgtttgatgcctcctgccctccccagaagttaatcttctgagtttctgccctacttggcagctgtacttcccaagctccagttcctcaccaaccgctgactgttcttgggtttagccatagcagccctccacctgaatttctcccaaagtaagaggaaagataggcttagtgcagtggctcacacctgtaatcctaggactttgggaggccaaggcgggcggatcacttgaggtcaagagttcgagacgagcctggccaacatgacaaaacctcatctctactaaaaatacaaaaataagccgagtgtggtggcacgtgcctgtaatcccagctactcgggaggctgaggcaggagaatggcttgaacctgggaggcggaggttgcggtgagctgaggtgacgccactgcactccagtctgggcgacagagtgagattctctctcaaaaaaaaaaaaaaaaaaaaaaggaaagaaaggtgtggcggggagatagagaattcaaaggagccaatgtattacatgcaatgcattcttatttcccctcaatatctggctgctgcaaaactcgtcaggatattaccagtggggaacactggcctaaaggcagagccagtagtaactcccaggccccaacgcacaatgaaaatgtgggatcgcttgttcaaagagcagaggaaggtgccatacaaagggactattaagccacttcctttcttccttagtctctgtctctctgtctctcaactcgctgttctttttatttgctttttaatattgttctaagtgaacaaaaattggaaccttgaattattagcatgaatttcttattcatctttaaattgtgcgatggctattttaaatgcaaatattagagcatttagcttctatgtggggtcactgaaattaaacaaatgtgtattttgtggctgatccctgatgggtgcctcaggctgaccagaagtttatgacaggcacagccagactcagggaggctgggaggaagaagagaggatttcacagagtggaatcctgccgaggggaggctcctcaggtacggggtcctagcagagtgagtgcacccccagcaggaagggcacacccactggggtctgagagcttcctgccacccctggaagaacacattggctgtgccctggccagggcgtctggggaagtagagccaggcacgcccccttcctactggtgcactgctccagcccagagcgtatggccacggccaatcccatctctatgcaggtgtcactcacgggaggttcacctctgccgaaacacgggctctggccagccatccaccagacatgcccctttcctgccagccgtgggcgggatggccaccaccacgcctgccctgagatgccgtggggaatacatgcctgatcctgcccctgctgggggcagctgaaagcctgtcctggggagatgggaccatgctgcattgccccaggagccttcacttacaaaacacacatgcaagggtgagatgacgaagaacttcaagacagagctgcagagggtcaagccccaaggtcggggccttctgaggataggccctggtcatctatgaagtcagcctgtccctagggcgagcccagaaacctgagccctgcgctcagaccccatagcctgagggaacacctgctgccctgcatgtgccccctggatgccacctcagactcccgttctctgtggcctttccccagcctctgcttgggcatgtccacacacctctgaggcccaggcgaagccagccgtgctaagagggcactgggtgtgtgctgagcctgtggcaggcagggggcgggcccttgtccacagaggctctctgcagtgagttttgtttttttttttttttccttgagatagagtcttgctctgtcgcccgggctggagtgcaatggcatgatctcggctcactgcaaccgccacctctcaggttcaagcaattctcctgcctcagcctcccaagtacctgggactactggcacgtgccgccatgcctggctaatttttatatttttagtagagacggggtttcaccatgttggccaggctggtctagaactcttgacctcaggtgatccacccgcctcagcctcccaaagtgctgggatcacaggcatgagccactgctcccggcctacactggagtttgagcacacgcagctgtagccctcctggctgctggcaaccctgggatgagtctggtctcctgaggctcagcggcccttagcctggtcagagatgctgaggccccttggggatgcccacattcccccgtctaagggcagaggggtctcccttccaagcactgtgaggctaggaggatggagtgagagccgtgggcagatgtgtggcccatccagctttgctggccccccagccccgtcactggcagagtgacttctattccctctgccttcattctgctcctgctcctcccagctttctactctggctcagcctgcagcctccaccttgcgttgctgcctcccctgggcccagccgggaggataaggggctctcctctgcccaggcccgccccccgcccccgagggcattgggagaccactgtcatgtttgacctttcctgcttgggaaacatactccctgaagtactgggtgctgccaggctgggacacaggtgacattgctgaacatgcctgatactgaccctggggctttggtatttctcacattttcaaaaacttgctctgccagcgcctgggctagtctctgctcacaaaccagatgctgtggccatgtgtgtgggcctgggcacccctaaagagtgggcttgggcctgacaggcgaggctgccatgctaggaggcagctcagatgtgtgtggcacctcaagtttcgtccccaggtacagacagggactcttctgcaggctcaggtaaatgggaggcagggatgaatgccttggaagatcagagccgttgtggaagtaatatgtttatatatgcatttttttcttttttgagacagggtctcactcagtcacccaggctggagcgtagtgctgcaatcatagctcactgcagcctcaaacttcagcctcccaagcagctgggactacaggcacacaccaccatgcctgactcattttttaaagatttgttttagagacaggttcatgctatgctgcatggtggactcaatcacctgggcttaagtgatcctgctgtctcagcttcctgagtagctgggatcacaggcacgagccaccacgcctggctacagatacatttttaaaagtaaaatctatctgtgccaagacttcaagaaatataaagcttgggcccaaggctgaagcttcctttgtggcttcaagcatttcactaaagcgctaatttcaatcctactcttcccgagaagcctaaggcctcaatgtgttgcttaaatatcaggatctacaaagaccttgaactgtctttgtgagcccctggtcccaccgcactccttgtagacaggaggcagaccattgcagtgggtgatacccagcctgcagcaaggccagcgctcaacctattgctaccaggaacacgtactctcaggcctgccagaggccaccagacagatgtaaggcatctccccctgaagtggccccttttttggatggtaagcattttaaaacatcagttttacattaaagtaaatttggacgtattacttgcatgaaagcaaaattcacgtgaatttgtcaaggtaaactggagattctaaagctgtgttggcaaactctggccccagggccacctggcccttcacctgtttttgtaaataaagttttattggaacacagccacgcctattgatttatgaattgcctgtggccatttttgtgctacaacagtgggttgggtagttgcaacagaaaccatatggcccacaaagctgagaacattcactatgaggtgctaaaggaatttttgctaccaggctgtgcagaaatgtacttgcttagtgcctgccttgagctgtgatggccccaggcctccaaagtgagcatgtgcctttcactacatcagtgcacgtgggtgtacgtattagggaagtactgagcacagtgggctgctcagaccccagcccacccccacactagccttatcagctcaaaggaccggtgaggctacttcggggattctttttaaaggatagaatgaactgctcttaaccgctgtagaacggcagagcaggaggagcaggtttccgggcatgcagaatagtctctcccagctgtgttaactgcttatgttctgggagaatgcctgagcccccaaagcatctcttctgctgagggcagacacgctcctaggcctatggagaacgtggaatccaaggatcttctgcgccttcagtcgcggctataacctttgacccctcccagcacgagaacattctctgtacagtatgttctacgaccgttttttttgaatgaatgatttctctctatgccaggattcagatatttttcctcttttcatttctaatttaatccagaaattggcctggacttaccagagccttgccagggtttgcaaacaatccgaaggcatatgggctcaatttctcaccaactttcacgagtgctgagaccgcatggtggcggtggggaaggcagtggtcggacaggagtgttttcagctggtcgtggtggaaatctcgtaaactggccgcagagatgcaaaccagccaggcggaaggcgtcgccccaagtcatagttcacgagtcgctggctctggttcctgggaaagagaagaacatctctgaaactggacacgaaacacgggtcccttaagtggggggaggcaagcggggttcagggtctgctagtggtgctgtggccctgggggtgttgctggcactgtttctgttcctcacgcttgtcccgctggccttacagcctggccctgtgtgccaccaggagacacagccatgagggccagtggtgtgtgcgaggctgcacgcaaggctcagaagagggcagtgccctcacgtgctcacagtagccaggcccgaggggcccaggtggctgaaggctgttgggagtggtggggactcgggcgaccggagaggccacgcccccctgcagagctcctcgtggttccactcgcttgtgtttctgtaggaataagcagaccactgctgccagctcgctcttccatgagaagctggaaatctactttttttgggaaatctaattatttttcaatgtgggccacagattgaaattaagaagccacactgcacaggtgaagcagaacacggctgcaggacaagtctggtgtgtgggtggcctgagtgttctttccagcctagaaggaaggaggcgactgcctgtcctgctgcgccctgtgctggtcagtgccaactcccggggctgttgggagcaccactcgagttgaacaccaggaaagtgctcagtagagcacgggtgtgggaggagcatgctgggattgggagctgtcctcagtcatgttcggcactccctggactcctggcctccgcatccctgcactgggggagctcagagcacaggagtatggggagcgggatcaggacacgtgattacaccttggttcatcagggaagggtgcctggggcggctggtcagggaaggctcctcggacaagggccaccgcagttgcctctaatgaggactcctggtggtggcacagcgcgcgcaaaggcctggccgcatcgtgaatcgcagtgcgcagattgggccctgctggagcttgtggggcttggagagcgggagcgaggttgatttgtggtctacaaagatagactcctctctcttaggaggtttggggcttatgctttctatccttggaaacacccctccccacctgaggaggggaactcacatttgctggttttgcacgtgctggccctgtgcaaggaggcacacctgtgacctcactaccttgccccagtggccctgtgaggttcccttgcctgcatcaggtcactgagactgagagagacatggccagagcacggcagatggagtcacatacctgtgggaaggtggcccctgtgctggtcctcccctactgtctggcctgaagatcgagagctcccaaatcccctagcatgctccgcgggttctcatctcaggcctcactgacctccccacagcatttggagtcccctggccacacccgcctctccccgcaggccatccgctctgcctcttgctttgccttggcttctgcatagatctactgtgtcctcctgttctgaggcccacccgcctgcccactcactcccttagtgcacccggatagagcagccctaggtgctggggatgtcgtggtgagcacgggatccagaccgcagggagcacatgttccagcagggctggggaggccgacagaccagtgatggtgagcaggtggggaacactcgaacaggggtcttgtgggtggatctcacctctgcttcctcctgaaatgtgcagcaccctccccaccagtggacatctccccacctcctccctcctccctcctccgcagacctcctgatagctgatgtggaagcctcccagcatcctgtccttggcctcccgcggggaactgatggttgtcagaatgggagttagagtccctgtggacgaggagggccagccatccacacacccggatgacagcttgaggcagcctcggagcttgtcttgtgcaggctccagcaaggaggtgacagctgaaccacaagaacagaggcgatgatgtgccacgccgggctgtcgggctgacctggcgtgggctctcactccctgaggcccctcccaggctgcccctggagctgagttgcagtcaagcaatcctgggtcttcctccccagtccaggggtctccttggtggtgtgtctcagcagggttagggactcccacaaaggtgactttgtatcggacccagagagggtctgcccacctgatttttcactgagtacctggaaaaggcctggcacgtagtaggtgctcagtaaatctcttttgaatgaataagtgactaaatgaattcccataaagcgactgtgatctcagagactcccataaaaatgaactctatctgtgggtgtggaactcctcgtggctgggtgtccttatgccttcgcttctatgacagaggctgtgtctccatcgtccatgctgacgtctgaatggccaggtcccgggatacagtttctagttgcagcaggtttgccaaattgctcctcagagcctctgtactgactcccatgcccacttatgtgagcctctcaatctctctgtgcctcggcttcctcactggcacagcggggataacactcactcgcagggtgtgggaagggaaagatatcgcacgcggggaagtactcggcgtaggcggagaagatcagagccgaccagcgaggcgagcagttgttcactcggcccatgatgtctgggaagagccccagccagctcccgtcctggacaagcttttttctcatgggggccacctgcttgccttggcacagcgaggacagggccttggcagccaaaggagacggtcagctgtctccacctggtagtggagatagtcacagtggggtgatccttgagctggttttggtcacagagttggtgtctcccaagtggaaagtgggagggcatcattccacacagaggagccccttgtgcaaaagaggtgccagccctcggccaccctgggagcccgctggggtgggagaaggcgcgtgcggctgagcttggccttggtcctgaagcctggggaaacacgggagtactgagcacccaggttgcatcagcaagaatgcagaacagtccctgcctagtggagacggacagacagctaacaaacgaaggcgactggagatcacgatggtgccaggaagttaccaggatgggacagcacccgaggcagcatagggtgccccgtgggaatgttcacagagtgaggaaacttcagagcaagggaaacttccctgcagccagacaggaggaaggaaacctggctgcagcctgcaagacctcccacccgcgcctggcagggagcctggcctgggggctgcccatgctggcccttctgatcctgagcagaagtgatcacggacccttgtgcttccaataattcggcccctcttcctttggttctgggtttcctgtgtagcggtgggcaggatttcatctatctttccatctgccagagtctggcaagggagctaagccacataaacagactctggtggtgcagggggattgtgacctgctgcacagaagggcaaagccgtttcccgccaagcccaagaggcgctggaacatctgctctgggtgttggaaagcaccctgcatgactgcgctttcagggagggatacgctggcagcagacgacccttgccgtgagcttgtaatgcaggacccttcttgcagccttcaccttactcttgccctgcgctctgagtgccttgggggcccctgcccaggtcgaggggcacagtgcaaggtgatggcctgcagccctctgtcatgccttctcagtctctgaggggttcatacctgctctgccagggcctctcccttcttcctcatcatgcatggatgcctggggagtagggaggctggcctgagtcctcctcagctttgctctgaggtggtcgggtctgacgcctgggccacttaggcatgctggacccctgcccagtccaagccctatgccttgatgggtgtccactctacagcctctgccagccagtgccagctacccacgccctggccctcgccagcaggagctgctgcatcccacacacccccttctggagcgaggggcatccatgtgctgcctgaggcccattcattaacatgagatccctctccattctaaccacctgcttggccaccatgtgggttggcctccaccctcagcagagggtctcatctcagtgggaagtggagcccagaaccccggggactatctgcatctcaccctaaggcgggggcagcggtagggatagggctccggctccaagcctggtgtgggctcagcagcccgccccccaccccggcagctgcttgctgccccctcccccacaccgttcctgtcccctgatgccacagctctctcctcccatagcggcattttccttccctctttccttaggtcacactggtgacagagcagcggcagaatatgatgtgtgggggaataaaaatgcattgttctcaaattacatggtggtgctcaaacggacccaggtgaccgagctcagtcacgggatgggccgggccacacagcctctgagacgggcgtgtggggggatgccagggccgggggtggcacgagccctggccacttagggcccctctttgaaaggaaactcctcactgagccccccagggctctgtggccagggacagccgacaagctcagcagagttccagggaggcagggccgtcctgcagccactgctagcaagaattagaatccctgacttttctcggcctttccctgtcagtggctcgcagtggccgagaggcccctgggggacactgggctctggcctgaggcctcggccgtgtccttctgcgtcctgcagcctcagcagcactggtccttccccgttctgcagcatttccctttctgatgaggcatccggtcagcgggtgggaaggtcagtccctaagtggtggcatggctgttgtttccccaaaggcgacgcagccagcggggagagctccagggctgggtcacactcgcggacgtgcctgggcacagcagcccctccagctctggaaaacacaggggcatgtgcaagctgttcactcagacctctcccgatggtgatggccaggaggagagccagggtgggtgtaagggcgaagcccaggtggaccattctgtgcatggggtcccagggaaacagcttgggctgttggaccctcctgtaatttgatgacagtttcattcagcctgtactaggtgctggggatttcacttttgtcacgcatgtccgtgtgaagagaccaccaccaggctttgtgtgagcaataaagcttttgaatcacctaggtgttgtttttacctaaatcagtctggcctggtgtatgacaacataaactcaaggatagagcccaaaaactcgccaaccaagcaaataattatgctgaacccccttgggcactctctaattggatgtcctgggtcctcccaattcttagtcctttaatacctgtttttctccttttattcggacgctgtgtcttccgtttagtttctcaattcataccaaactgcatccaggccatcaccaatcattctatacgacaaatgctccttctaacaaccccataatatcacctgttaccccaaaatcttccttcagcttaatctctcccactctaggtttccatgctgcccctaatcctgctcgaagcagccctgagaagcatcacccattatctctccatatcacccccaaaaattttcaccaccccaacacttcaccactatttcattttgtttttcttattaatataagaagacaggaatgtcaggcctctgagcccaagctaagccatcatatcccctgtgacctgcacatatacatccagatggcctgaaacaactgaagatccacaaaagaagtgaaaatagatagttcctgccttaactgatggcattccaccattgtgatctgttcctgccccaccctagctgatcaatcaattgaatttgtgaacaatacaccctctccgcccttggggtaatgtactttgtgatattgccacccgcccccgccggacccgcccttgtgaatctactttgtatgatacaccctccccacccttgagaagatactttgtaatattctctccccccaacttaagaagatacttagtaatattcttccccacccccatccttaagaagatactttgtaatattgtccccccctaccttaagaagatattttgtaatattcttccgcccttgagaatgtactttgtaaaatccgtccccagcccacaaaaaattgctcctggccgggcgcggtggctcacgcctgtaatcccagcactttgggaggccgaggcgggcagatcatgaagtcaggagatcaagaccatcctggctaacattgtgaaaccctgcctctactaaaaaaaaaaaaaaaaaaaaaaaaaaaaccaggcgcactggcgggcgcctgtagccccagctactcgggaggctgaggcaagagaatggcatgaacctgggaggtggagctggcagtgagctgagatcatgccactgcactccaacctgggcaacagagagagactccgtctcaaaaaaaaaaaaaaattgctcctaactccaccgtctatcccaaacctataccaacgaatggtagtcccaccaccctttgctgactctctttttggactcagcccacctgcacccaggtgattaaaaagctttattgctcacacaaagcctgtttggtgatctcttcacatggacgcacgtgataattttcattgttgcttcaacctgaaacaaccctgagacacagggactattattatctccattttatagataaagaaactgaggcccagacaggttaagtaactggccccaagtcacgcagcaggattgtggcagagcccatgctggcacccatgaaatctgacctcagagtgggaatatcccccccacactctgctaaccccccaaattcaggagagggggaggggcagcctcttgccgtcgttagtacaaacccgggaaggtttgtaatgcgacctgtcttctcaacgtgcctgctggagtgccacactgaggggtgcagcacatctcttgagaccctgctgggctctgtgcattgatgagctggcctggaagtggaggagccccgtccccaccctgaggcatctgcagaggtatcagcagagtgtggacaggcacaggagacgtcgcctgaggagtgagggggtggccttgggcagagtgttcctgcgctgggtattgaaggaggggactctgaccacctcactttttgatgtatgaactgagcctagtaattctgatcctggccatttccgtttcatggtagtttgatattttgagcaagagtcacgtttcttctagcattccctctgaagcatctgctgaggagccgagggtgaagaagatctgcaatgggaacgttgattctcatgataagcccaggctctggcagccccgtttaggcaccatgcaatgcctaaactcttcctccacggaggccagcagacctctgtcccctgctcctggctgcactctcttctctgcctccatcctggtggtccaagcctggcctccgaaggggcacagagagaacagccttctcctcacttatttcagggggtcccagagaagccacagagcagcaggcccccctcccccaggcctctgacagacttttcaggcctggcttgctcctggacatggttttgccaggtgggccacaggctgcctctggtggcccaaagctcagctgagcgaaggacatgggaactttcctgaaggttggggtggctgctgttccagggcccctgcctgtctcctctgtggctggcaggccagtaggcctccccagtagggagcctgcaccggttcccccctttctgcacccctcccccaccttggcagaggacaaagtcacctctgcccagcagccgcaggccacctcccagggctcaccatcccctgggtggaactctgccaccagtgaggcaaactttacattgccatgcagagccgctccttcctcattgtctattccagaacagaaacttggctgcatctttgcataagcaaaaggcgcattacaatgtgtttccccaaacaagagagcccttggcctctctccgcacagagatggctgcggctttgaacatttccccccaaggtttaaagattccaggatcaatttctcagacagtactcaaggacattgtccctgggcttcccctccccctgcaacctgggaaaggagagctgcttctccccagcacacgcaggccttgggtagggtggatgcggaggaggcccccagggctgctggggggaggggaggggaggcccttagctgggggcctccccatgagaggggtcacaggcctacgctgggtcatacattttgcccatttcctgttattccatatcttcaaagtgattcactccattcattcagcaaatgtttactgagcacctactatgggctagacactgctgggagcagttgcacggcaagtccaaagttcctgaggtggagacaggctgcctgtgcaaggagcagccgggctagccgctggagcacagggagcagggccagggcagcccgagaagactcagcagggccagaccctcctggcctggaggtcacgccaggaactgcggtctcatgccttggggtaggaagggtttaagcaaggaggtcactgcctctttcctttgagatatattttttaggatgagtcttttttttcaaatgctcctgagatatctaaagaattgaggggctgcacagggagagtgaggattccaggcctgaaccaaagcacaggcagcaggagagggcagccggctctggggaaggctggctgggctgtcaggagcaagggtgccatgtggggaggtatctgaagtgacgcatggagaagccagccagggccagcgtggagagggctccgaatgccaggcgaggggctgggccctgcttccgaaggcactggagagccgttgagggttttagacagtggaaggggaaggtgagatctattccgcttggtgatcgtagtgaagaatggtgtgtgtgggtgggggggtggggaggacacgagggggaccgttggggagccctaccgcctgtctcctgtctggcagagaaagtgggtggggccgggggaggagggggatgtgcaggaggcaggcatgtggaggtcgccttctgtcttcagttgctctttttgccacatcagtcgactctctgctctgcagaaatgttgccgctgtgtccttactgaggacgccagtgttttgtcgggaattacactgattactcccagtggttcccatgcccaggtgggccctgcaggcctctggccagggctgggcaggaaattttggcaattttgcagcctcctgaaaagcaggtagagccctgggatggtagagggggcaggacggggctcactcctcaggcccacggaggacaaggacactgtggagcacccctgcctctcacatgccccacaaaccctgcctgccccccatgtctgttcctgatgtatcatattaacctacggggactgagaggctggacagcagaaggagcccggccccggactgtgggttggactttgccatagcacacgcaggggcaggagaaccacccaggccagtggtcagtggtctctgggccacagtgccccatggggttcctgactgctgggaggggctgctgagacctggcctgggagggggccaagttgagggctccggagcaggatcccaggcccagcagccacccagaggagccaggaggccatcgcaagccccaccacggccttgctcaggcctgcctcccagagagtgggcatgcctggggaactatgtgctgtgctggtgtggaagggaggaagggacagaggtttcctggggagaggatcagggagagcgcaccacagttgaaggctaccagggagggagggctgagggggccttggctgcggcctggcctccttctccctggctacctgctgggagcatttgcaggcatgccctctctagctcctcagcagccagggagccccagttaatctccgaaccatctgaggcttccagaggccagggtcagggcacccagcgcaggaggtgggagctggctgctggcggacagcccacagtggagctccccagccaggggcccacgcctagcagcctgacaccccagggctcagctgcctcgaccccacctccaagcagaatgtgaggctgacggtctatcccagggagttccatgcccagcgacggggcttttggagtggttggtcacctcctgtcccaaatcagggagcaggattagatctgctcaatgttcagaaggacacaagattccttcttgagatgagagctgccaccttcggccccaggggtagggctaggagagtgggaagatcttgcgtcctgaggggcagggcctggccaggagccaggagagggccagccccgcatctcctccctccgccctgtgggagctgccggaatgcccttccagagccccagcctctccctgctcaggcggggcagatgacccctattccaatccacatcatccctcacatccgtcccttctctgcactcatccccaaagctgaaccccacattcccacatcttgaccccttccatctactttccgtaaggcacctggagtaagcttcttaaatgccccgccatcatccttcctccatgtcctcccactgctcttagagaggatttggaatccttctcctgacttcgtggtctggcctcagtgctcccctcccacctcctctgctggggcatcccttccacatcccctctgtgcttggaaggtgcctcgctgcttccaaccctgggaggtttgcatgggctgcctcctctgccaggagcgccatccctgctttgctgagctaccctgttctgtttctcaggtctcatgacatgccacgtccttccaggccccagtgggcagattcccactaatatatcctctggttccctgcctttccctcgaggccggtgatcctggagctggtctcgtagcatctgagtgtccctctccgcctcctggcaggagggctggctctgatctactcagagccacaattcatggtgaggcagtggttctgctgggtctgctgggtgccagcctcagcccagtggggaaggagagaccaggtcaggctcgcccaggccattctgggtcccagggtgtggtgggctgcacaagaggccagggtcagtttagtttgagaagtcccattgagagcctgtgaggggcccgtggctgtgctgagggtctgtgtggacggtgaggtcaacatttacacgcttaggctcaaacgtggggaaaaatgcaactttctttcattcttttttttttttttttttttttagacagagtcttgctctgtctcccaggctggagtgcaatgacgcgatctcggctcactgcaacctccgcctcctgggttcaagtgattctcctgcctcagcctcctgagcagctgggattacaagcgctcgccaccatgcctggctaattttgtatttttagtagagagagggtttcaccgtgttggccaggctggtcttgaacttctgacttcaggtgatccaccgccttggcctcccaaagtgctgggattgcaggygtgagccactgcgcctggccagggctttctttcgttcctatatctggtgctgccctcatctcgggcactcagccccaggatagaaggaaggctgcagtctggcctgtgggaggtggctcagtctcttccccataaagcctttgtctcattccgcttgggctggtataacaaaatgccatagacccaggggtttaaatcacaggaattcatttcccacagttctgaagactgggaatttcaagatcatgttgccagctgggtcattccccagtgaggattctcttcctggtttgcagacagccgccttcttgctgggtcctcccacggcagagagagaggatgcaggctctctggtgtctgttcctataggacactaaccctatcatgagggtcccacccccatgaactcatctacccctaattacctcccaaaagccccatttgcaggcagaggcctggtggggggcagtagggatgagtcccctctgcagtagccttgcaagcaggcctgccctcctctcctgtaggccagtgcccccctgggcttgccctgaagcctggtggtgccccctagagccaggtaaacctgcaagccagtccccaactatcttgcccatgtgtctctggggtgcaggggaccctggcatctgctacacacagctgggagctgggccaccctctcaggcctgagcaggctgggccaccagttgggccctggaagccactcctactgctaggaacctgtcccctctcaggtcccaggcagcagccaggatcaagctcttttgcatttccttccttctcagatgtcaggactgttctgtatgacctgtgaggttggggttgaggatgaggagaagcctggcccctcatccctggcctttctcctctctcctattctgctcccttcagctgcagtgggaccttccctcggtcagactccatgagccaagctggccaagctttgtcgtgatagagaaagcaatactgtggacaattacagaaaccccttctctcttaagaaaaactggcttttaaggctactgtgccagcgtggactaaacaatctagtctgaccctcaaagctgggcaaggacttctgtggtttaggggtgcataccctacccccaggacctcacagggagctgcagggcactatggtttaccagcaatgaaaaaccgtttcattgtttgcacaagcaccattccattgcacctgcatgacggtttcatccccacaacagctttgtgatggggggactgcaatcctcattttacagaggaaacggagggcgatgaccaaatggcaaggcttcctggggacctgggtgccctcctcggagctccatcttgtcagccacaggggcgagatgggtcactgggggtctagaggataaccctcagcgcctacaggggttgctgacccaccctccccagacgcctacagcccggagccacggtgaccagccacgctcccgtgggtctgatgagttgtcccttgcctataggaaagagaggtgggagttgtggggagcccatttacaatcagatgtagatttgctgggcagcagttgccaagaggagctgcgtttgggctggatggtaccctcagcagggtccacatgtcatgaactctgccccacgatcggtgccatctttgttcccagcaccgatgccagcgggcctcgggatccttgtcttgcacgccctgtatgcctgtccacccatccatcatgatgtcattctccttgtgaaccctcgggtttcctgaggtgccttcccactgttttgaggtagcaatcactgttgctcagatgcaggctctacagattggagtgcagggagtgtgtgctggcctgacgtggcagcaggctccgggaagtatgtcttggccatgtccggagctgtcagcagcccctgggctcggtctgcacacagccagtccctgtttctccacttcttgatggtgccaatggcttcagcctttcagcgggtatccctgagtgcctgccaggtgctgcttagcctggctctgggcatgcaagcagggaggatgcaggtggctgcccagcccacaggggcacacagagggctccagaaataacacaccttgtgcttgatgaggggcggctcaggcctgcggggggccttccagggggaagtgactgctgagctggcctcgaggaggagtagggtttggttaaccaacaaaggaggtgacaggaagggggctgcgctagggagggccctgggtgtgtgcggtgggaagctggagggtgggggctcagtgcgaaggaagcccctgacagcctcgagcccgggataacctgacctatgtttctggagggtcttgctggctgtgttctgtagaaggggagttcacccccctgtttttgtgccacgggtccctttgatatctgctgaagcccattggcacctgctcagaataatggttttaaatgtgaagaatgaaacacgtgtaagaatatgattgtgataaatacagagacggcgactgcaggagctccagccatcaaaacagaacagggagagcacattggggatgcagtaatatgagctttttattaacacgttaaaacattatacctggtggtgggcctagaaccgcccccatttccaagtagcgatgcaggtaggtaatccccacacccaccagctatagcttggagtgacttctgccagggccggtcccagccctgcctgtgccgcgggggtccatcacccacgttcactgttgaagggaaggttgtgtttcagctggaggctacagcaagcgtagggctgctttccctgcccacgttccatgttcaggccccaggtgaggaaaccctgggctggtgggtggggttgctcaggaaggggctacagtgatcccagcaggtggtggtggcagcctggagaggcagagggcagggggcaatgagggaggggtcacaaggtggctcctagttgatggtgacgcctgggtggaaagcatgggaagaagaaggagcaggtgggggtcatcccattggcagagccagagccagtcctagggcctgtggttcccgctgatgcctccctgtttctttcaggtcaatgaaatctaccatgacgagtccttgggtgcccacatcaacgtggtcctggtgcggatcatcctcctgagctatggaaaggtgagtgcactgtggccagccgggcctgcctccaccccctcggagtgaggggcctgggagtgaggcatgggcctccttggagagtgtgtgcgtttgccagaaccaccctgcctctccctggctcccctgaggttcctataagaaacaagatccctgctccctttcaccccttgttttaaaatgtggccattactattgttcactgaaaagagtctgttactcccagatcccaagaggaagagacataccaggccacgggggccacacagggaggcaccaggggtggtcaggaggcagagggaattgggtaaacagcagcctgagtccatgttgtttctgcaggaaggaccgatggggacagggtgagctggcttaaggttggccagtttgaataattccagtgggctctggggagtggagcggtcctgagttagttttctgggtaatgagggcagggggatagtggctcagagtgtgaagtctgataaaggaggtggctggggacatgggcgctggattggttggtttgtatctgaaaaatgtgctcatggatgagttgtttcctgtctctaaagattggttaccacttagcggggcagtccctccagagtcagcaaggctcggatgtcaaagcatcagaaacacgtggttaacacgaccctcccttggacttctgcccccgtattaaatctgtggcctcctctcctctggcctcggctgctgtcccagctgggctctcttgcccgtcccacttcctcttgcagccaaacctgggacgtcctttcctggcggtgtgcatgggtgtgtagccgccagggacagtgacctgggatggcaacacgggatgctgtgcagacagaggaagagaggagccccacggtacggcccgtgtagactgcaaagtgcctgtaccagccgtgtgggaagcactttgtatggatgaatgcccttaatctacagggcagatggaggggtgcacactgtgactctgcccatttcacagataagaacaccgaggcttaatgtgacttagtgacatgcccaggtaagcagccagggccatccagcacccgaggagtcaggcttcttacccagacagcagaattcgagcctgtggtctggctgtgcatagaaaatcaaatcataataggatcaaatacatcagataattatataaaagttgaactctgttcaaagagaatctcagtctcaaaaaataaaatcaaactgcatacaacttataaggcacacgatgtaaaaatgatgacgaaggactccggtggcagaagggatcccaggaatactaagtagatttggggccacttccctacacccaccaagcacctcattccacagtgaccgaaggcacccacagggcggatgccagttgcaggccttcgtgtaccccaagagaacacaaaacatcccaaaacaaatccttggaacaaaggggaaattggcaaaaacctaactatgagagtctctaatacacttttaaaagcctttcacagattagatgctaataaggcatagaatttttgaatgacacaatgagtaaagctaaattagtagttatatcactgtttcccttgccctacagaaaaaaagaaagatgaaccttcttttcgaggaatcatagaacacttaaaaattacagaagtgttttgggtcataaagaaaatattgtgaattttatacagctaaaacgattttgtccatcttcgctgatgaaatgcctaaaagtaggggtgggggcagcagaatttataaacctaaaaaaatccaattcatttgaaaacattaaaaaaaaaaaaaacctactaggggccaggcatggtcgctcacacctgtaatcctagcactttgggaggccaaggtgggtagatcacttgaggtcaggagtttgagaccagcctagctaacgtggtgaaaccctgtctctaccaaaaaaatacaaaaattagccgggtgtggtggcatgtgcctgtagtcccaactatttgggaggctgaggtgggcgaattgcttgaacccgggaggcagaggttgcagtgagctgagatcacaccactgcgctccagcctgggtaacagagcaaggaaagagaatattaggactgcagtacagactatttggaacactaataaaaacaagagcactactgtcaaatcttttggaatgtggttaaagctgtattcagaggcaaattcacagatgttttccaaaagcttcttccttgggtgatatgttcgacacacattagccctgccttcaactcagtacatttgaatgaatttcaacagcaacaaaaccaaaaacttaaggaaagcaaaaataaggaaatagttcagaaaaagcagaaatcaataaattagaaaatggaagaaacacatagaatcaatgaagaagagagctttggaaaaagcaaccctctgacctatttaatctagaaaaaaagagagaaggcacaaactaaaagatcagaaagagtatatgtaatgtgactacaaaaagatacttctcctggcagaaaggaaagcatgcagggccatctgcccactaggaagctgttgggaggctctctgcagccggccacttcggaggtccagggatgatcagtggaggagggatgtgcagggcatcctctgccagtgaatgctggctaggagggcagagagaggctcgctgagccctctatcccaggtttgtggcagggggctttggaccacacagatgcagagcctgggggtgggccccagcccagcaatccggttccagctctccattcacaggcggggaggtgcgggggggatctttggactatcccatgtggctggctgcctgcctccagtggagttccctgttccggccttccccaagccgggtctttccagcctgtcccttcctggccaggatcctctggtgttttaggaattctcaagcctttggcatgagagatggacagagttatatcctcttttggaagtttccaaaaatgggaaactcctggtcctggggctagaaaggggagaaaagattatcccattgattggtctgggtgccaggtggcggcttgcattttcccccaggttgctcctacattgtttaaaaagaagaattttgtaattgactagggttaattgcttaccagtgctggcaaagctttggatcttatttggcctgaaaagtgtctgctctttcccagtcttgagtacttgatggaataaagcctcctttattaattactccttagcaggctctatgctaaattatcccgaccctaagccttttctttttctttttctttttttttccttaactgcctcaggtaggtagaaggagtatgtgatcacagtcagaacatttgcagaagagagtcaaaccctgaaggtgagaatttgaggatctctatgccagggacacggagatcctggggaaattgaggatttcctgggatgtgaatatttcaaagctgactccaaaaaatggagaatatgccataagtcccataaccatggagggaactcaagttcttcaccttttccaaagttttgccagtgcattcatactcatttgcaagcatttatcaggcaagactaatacaataccctgtaaactcatgtattctgaaatctacccaatgtgtctttcgtagtcaatgggacccttatacccaaagatgccaaaggtagcccgtcaggacaaagtacagacctgtctcacttctaaaaatagaagtaaaaatcccaaggcattaagagtttaattgaataatgtataaagagaaacttctaccgtgatcatctagggcttatcctaggaatgtggagattgtttaatatcaggaaatctattcatacagttcatcacatcagtttccaaatgacaaaactcatcctctaacaaatactgtttgaagggcttctgtgtgggaagtgctgtgctgggaatattcactggcatagtctctgtcctcaggggaccgcttccagaaggcagatctagacaaggaaacaattgtaccagggctcagggctggatggaggagacgcgggtcaggcagtctttccttacaaggtcaggaaaagcaacgggaggaagtgaccgttccacccacacctgaagatggtccagtgaagtcaccagcatagagatgctctgagttcataggctgggaggggagggagggcagctgaacccagagggacgagcacagggacaggaacagcagacccaatgccaaagacgtcggaaggagccgatcgcaaggagcagagcagacctgcgtctcccgccaaggggtttggcttgcccatgagggcagctttaagcagtgacacgatcccatgtgcatttctaagaagatcactggctcctgtgtgcagaaggggcaggtgggagcagtggcttaggagacagtcactgccatcaaatgggggatgctggcagctggactgggaccaggcctgggtccagggatacagacaggaggacagaggaggccacttcgagaggatgtggcactaggtgggtgaaggcggagagactctcagctgggtagatgatggtatcaacccctgagattggggagcacaggagggaagctgaagaggtcagctgagatgtgcagttagaggtacctggtgccatcccagcggaggaggccaagaagatgtggatgtgggtctggagccctgcggggtctggagctgggggtagcagaagcaactgcaggcatgaggagcttgctgcctagggggagcctgggagagaggcctcagggctccagtgttgaagcctctggcagggcaagggcgtgacggccccgtagcccctcacagggcactcctccttttccagatccccagaaaactagtaacagagggcaacaggacaaccaagattgtatttaaaggcggaaaaagaagcacatttccctaaaagtgttctgcacagcgaattcttaggatatgagtagatgttacagaggactatagaggggtcccaaggtcaaagaagtctggaaaatgctggtcaaacaaaggaaaatgggcattcctgggggtgaaatttcccggagactttcctgtggagctgtgcatggtgtacctccgagagtccgagcagtacaggtggtctctgaaaactttctccacggaagcttcttgctcagcagatccgcagcctgctgaacctgctctggggagcactgccctggagatagtcttggaaacaaacaaacaaaaaagacccataaactagttactgtggttctgaaaatcctagatacttgtatgtgacatgaaactagtattggaaaagagcagagacaaattctcattgtttgctgttaatcatgtgtcgggaaaacctaaaagaatccacggtacaacttgtagagttaggagaggagtctggtgatgtggccaaatatcagaccattgtttaaaaaatcagtagcttctgtgtgaaccaaaaacaacagccttggtagtggggaaaacagggagagaaaatttccattatggtagtaaccaaaaatgtagaatacctggaatagtcctgacaagacaatggacccattggaaggaaattgtacctgattaatgataggaagaaagtgatcacaaatgaagacacaaatgctgtcctcatgggaagctgggtataatcgagaggttggcctttcccagattcatagttggaaatgttatgaagtgattctaagcaccatctaggaacacgaacggtcaagaatggctgagacagctgcggaacccaagcaaggaagagacatcctccaaaggaacatgaacggtcaagcatggctgagacagctgcggaacccaagcaaggaagagacttcctccaaagcaacatggacggtcaagaatggctgagacagctgcggaacccaagcaaggaagagacttcctccaaaggaacatgaacagtcaagaatggctgagacagctgcggaacccaagcaaggaagagacttcctccaaaggaacatgaacggtcaagaatggctgagacagctgcggaacccaagcaaggaagagacttcctccaaaggaacatgaacggtcaagaatggctgagacagctgcggagcccaagcaaggaagagacttcctccaaaggaacatgaatggtcaagaatggctgagacagctgcggaacccaagcaaggaagagacttcctccaaaggaacatgaatggtcaagaatggctgagacagctgcggaacccaagcaaggaagagacttcctccaaaggaacatgaacggtcaagaatggccgagacagctgtgggacccaagcaagtaagagacttcctccaaacatcttgtaaagtgaagataattaaaatagtgccatatgtgcataaactttcatagacagttcagttgaataaaatagttgaaaatacccctcttacaaataacctaccgtgataaacacagaatgcttattgtgttataaataaatatataacataaatttaataaataggaaattaaattatcatgtgacaaatataagccaatacaacattcaactatttaaatcacacaaatcaagaagaaaatattggttgtcaagagctttctaagcataaatccaattgaaggaattgtaaaggggaatatggatatatttggataagtataataccaaacttctgtcaaaaaacacaatgaaaaggcaaatgacaagcaggaaaaacatttgcaatgtgataaatatatcttaatatataaaacctcctctaaatcataaggaaacaaaattgtcaatggaaggaaacaaagaaaaaaatccaagtggctaagagaaagcccatatggaaaaatatctaactctactgttaaagaaataaataatacaccatttataaagcatcaaccctgttaagatgaagagggatttatggctgggtgaatgaagcaggcacactttgagtatgagtacagatattctaaggaaatgtagcaatatttatcactgcccttaaaaatgttctttttttctttctttttttttttttttttgagatggagtcttgctctgttgcccaggctggagtgcagtggcgcgacctcagctcactgcaacctctgccacctgggttcaagtgattctcctgcctcagcctcccaagtagctgggattacaggcacctgccaccacacccagctaattttttgtatttttagtagagatggggtttcaccaggttggccaggctggtcttgaactcctgacctcaggtgatccgcctcggcctcccaaagtgctggggttatggggcgcgagccaccgcatttggcctttaaaatgttcttgatgtttgcccccagacattcatttctgtgaccccagacattcatttctacaactctgttccaaagcagtgatcccagctgtgggccaagttttaggaacaagacaagggtcatggcattatctctcatgtgaacaacagcaaacaacctatattgtccaataatagtggtctagttaagtaatgataaacctatgtggtagagtattaggctgccacaaaattgcattttcgaaacatgtttaatggcattgggaaatggttacagtctaaagctgtttgttgtttgaaaagcaggatctcagttttccgtatgatctcaatttggtgtacaaatatatttaccaaaaagactggaaggaacacatcaaatgtgaacaggatttctctgtgggcagtaggctaattaattttcattttcttctttgtactttactgaattttttaaattcaatatgatgagcatggtttttattattattattattattattattattattattaagagatggggtctagctctgttgcccagactagagtggagtggtgtgatcataactcactgcagcctccatctcttgggctcaagggatcctctcatctcggcctcccaagtagcttggactacaggcacgcaccaccacactcgactaatttttttttctttttttttttgtagagacagggtctcactctgttgcccaggctggtcttgaactcccaggctcaaatgattctcctgcctctgcctcccatagcactgggattacaggtgtgagcagctgagcctggaccagcatgtttcttttataaacaaaacactgcattttaaatttgtgaaatttaaattttttaaatgattttttaaaaaatcatttaaaaatggtaggatccaaatgatgccgtttgactgaattcagcactctggagaaaggtctccggtggcatgccacagggctctgtcacgctcagtcctttatttctgatttcaatgaagacatcaaagagaattcatgctttcccttggcacgtcatctctgcagtgggctggggaggagtaatgaggtttctgtgttccaccctatgggcgctagctcacgcttcctgtggctggggcagggggtccacctgcagcgggtccacctgaaggaaatgggaaatcttggagtgaggacgcaggctgccataggtacgtggtctcccctgcatgagaagcccacgcccctgggttagcaggcaccaccctcctggccagggcctccttggcccctgcccctcatgcgccttgcctgcagaagttctgctttgctgggacccccacccctcatgcacctgcagaagctctgcttcactggggccatgctggggccccacttccacttttggcagagttgggaatggggcagtgggcaggggaccggttgtcaggtgcagcctgctcttcccagggacaacatggggacatgtgcaggccctgggggtgctgagatccatagccagcaaaccagggcagctcatgcctgtggtgggcaccgggcaacttctgcgacccaggtacaaagagaacagagaggacataggtgaactgaggctggccttgcttccgcctcctgctgggaaggggcttgagaactgatggtggtgagggattggaagacagaaccggaagctggacgcacgcttccagagctaactccagatggaaccagcttacccccggccccgagggctcagtggacccgcagctgaggaggcaggggagaggcagtgctgggttgtgaggggtgtgggacccaggacaccccagtgcctgttcccaggcccctcagcctagcttggaggacaacacacagccggtccctctgtcagaccccgggaattcagggatgattggcctcctggaatgttctggaacattccagcattctgggcctttttttctgctcctaactcatgcctgcccagagtggggctcagcaaagctcaccccatactctgcccacctttttctgcctggccctaccccgccttcctcctagaagcctcccagatcaagcacaggaggcagtgatgggggtaggggacgccagtgcccatggggtccgctccatcccggggatctcctgagttgatcagctgagtgtagactgccagaagagccgggcctgcccgctgctgtgcccttctctggggggttctgggctgtgagaggggaagtgagccgaggctatgagtcctcgttgctttaggttggacctactgcaaaagtgcaggaaatagtagagcagaggaggtggcactgctaggggctgggctgaaggcttggggtagagggcacagcggctaggaaaatgggttctggtcatgggccctggctgacttagcgaatgtgctgtgggccacagggcttgggagcagcgtctgtgggaccggaggagccatctgccatccccaggtggccaggggagaggccatcctgggagcagcagtacacagtgcacctcaatgccaaagacctggctgttttctttttcctatttcaaacccatcacagaccaatacttccgtaccatacgttataaatgaattactgggaaaagcaaatgtgacaaaaaccgaggtatccaaaaactctaggtctggatttttattattaaattctgtggacataaactcaacccgtccaattgctataaaagtttctagtttctgtacttatctcactgtggactggaacagtttgtgtccaccaggcacagacttcactttgcatagcactgggggaggccctgttttcaggtctctgaggtgtctgatgaacgtgggaggagatgtatccttgtgcccccaaagcatccggccagcccagagcctctggcttcccgagcagctgctgtttaatcccagggaggtgcatgaacgaggaggggagaggagccctgtgtccaggcagtagcagcagacaagacagcgacagagtggtgagcaccggcaaggaatacagcagggtggcaggcaataggggaccatggatggagcagccaggatggggacttcccagccaagatctgggggcaaaaggcctagctcctgtgtccaagggaacagaccccttttgctcacagagaagcacagccagggattctcgatggggctctggggacaaagtttggcacatggtggggatgaattctgatgagctgctcttcaaggaaccacaggcttcccgtcaaggaatgaggcccccgtctctagaagaattttagcatggcaaaaccaaggcgatggcagtcaggagggggctgagctgtcccccccacggtggggacagactctgggggatgtgagaccatgacccagacttgggcagaaagtggcccagatactcggttcctgttattcatcccaaattgtgacagaaatagaccagctccccacctgccgctcccccattgcctgtcccccaggcctcaccaggctccagtggggataaaattggtagcacttgtttgagtgacatgtttgtcttctagcttatgagaagcctctgagttatctcaagtttttcctaaaacaacatttttctccatttcttaaaaaaaagcagaagaaaagagatgatcttattttatacaatataccaccagccagggagcagagcatcggcaacacttgaggttgcatagcaactggcttttcaattgattttttgagaaggtaccaaagctactcaactgttctcattttaaatatttcctaggatgatgaaaatcaaagcaaatggaaatcagagacttggggagcatcagagaaggacataaagtgtcttgttataaaaaaccaggtcaagacaaagtgtggaatgcttgctggaatttttcagcattggaggtgaaaggtctgagaaattctgcatgtgagtctcttagtggaaagcacgagaagagaggtgctgggggtgggggcttggtgtgcccacccacccacctatagggtagaggatttagagtggcccagccatggtgcaggaaggccaggaagtgaaggtctggggaggatatatcaagggccctggggatctgggacaggggatgaggtgggaaacacaccccatgcctcaccccagggacagccccctgtcctcctgagcatctgggtcccaacccccaacctgataggggtgcaaggcatgatggcccacccacatcatcctccatccacctcctcacccagacctacctgggtccagagaactaggaggcactaaggctggacactgcccttgggaggtgccttagtctgtttgggctgcaataacagaaataccttagactgagtaatttataaccaatggaattgtgttactcactgttctgggggctgggaagtccaagagcaggacgccagcagaactgatgtgtcgtaaggacccattcctcctagagggcaccttctagctgtgccctcgcatgatggaagggtgaacaggctccctcaggcttcttttgtaagggtgctaatctcatttatggagactccaccctcatgacctaatgacctctcaaagaccacacttcctaataccataacattggttctcagctttcaacctttcaaatgtgggggacacaacattcagattctagcaggaggcccctcttctgcctccccacaggcctgcactggctcatgcctgggaaggctcaagttgagaatcctgttctggcagcttggctctctctgggaatagcttcccaggctttggggaagatggctggaaacaaaatgctggaacgatatgggagttctggcagagaaatgaggtgcacgcctcctgccccagctctcgtggttctctgtcgtgatgagatttgatctgtaagccctgcctggaacaagagacctccagccttgggggagcccactttgcactcagctggggggcacggtagaacatgtgctcacagagcagggatggtgggaccttgtccctgccattcattctggctttgtccatactcgtgggacctttggtgagcaatttaacatcatggggccttagtttcccccataagaggaggtctgtgaaaccccagcacacaacaggaatgacgacaatcataaaggcgttcgtgcaagtgactgtttgtagagcttcttctgggacaggcaccgtctgaagccctttatgtgactttatgccctcacccccacagcaaccctgtggagtaggcgctgtgatcatccccatttgacagtgaggaccctggctccagggggcgagcggcctgcccggggccacacgctggtggagccactctgctctgggaggaggggctggactctgtgatcccggctggtcaggagcaccagcttcaggctccttgtcctggtcccctgagggtcagttgctcccaaccaagagtgactttgccacccctccccccacccgggggacatttggcagtgtctggagagacttttggttgtcacgactagggggagggttccactgggttctggcaaggagtgcccaggggtgtgctcaacatcctgccatgaacagggtgcccgcctcacccaacaggaattatctggccccaaatatctggagtgctgaggttgagaaatgtggtctgctcaccagaacccaacctccctgctgtcctatcctgcacctgtttaggaggctggtctgaggcaggagggcccctctgggatggggacggttgagaagctttgctgaagccgcatccccttgggggcatgagccagccccagcgggtaggccagtccccagggactggtgttatactccatcagtatcaacagcacggcagagacaaggacaagggacatttgtgggcgctgactgcaccctgcctgaactgtcatgggcggaagccccccagctccaagctcggagctgcagttgtgcccattttgcaggtggggacaagtaaggtaacttgcccaagaacagagcagatgagatatttcggccgggcctagagctgcccaggtgacctcacctgccacctgcagtggacttggtgagcctcggtcgcgtggcggcctgcggggctggctgagtgcgccttgcccagcaggcagagcctcctggcggggcgggcgcggttccagcggaggcggcctccaggctgctgatccccatcccggtttcctcccacgtctccttgactgaaggagggaagagcatagataattcagctccttccagagcaaacaatggaaatgtcggagagcaacgattggaacagaactttttgctcaggtcataattgatgtatttagggtgaggcccagaggctgtcttggggccgctggggccccgggagcccgggtgcggccgcggagtctgggcgccgggtgcgtccccggcccgggccgctgttctcgcggcagcagcgccacctggtggccgctcgggcccggcccttcctctgcccgccccgcgcggggggcagcaccccgacctctttccggctgtgggactcaggcgagtcctttcagttgtctgagacgcagttcgtcatccggaaggtaggaaaatgaagtggaagcgaggtgtcgtgtgccaagcctgagcctagcggggcgctccttgcggacggtgacttcctgctggggtcagcatctgccggggcggccctttgggctcacttccccaggcctcccgagaacgtccccgcagccggcgcctccctccctgcccagcctggctcctgagggtgctcgtgttcattccttcatcactgagcgcccagcagccggggtcctctggccgcgttcgctgcctcatcctggcatggagagcagaagccgggattgctccgtgaagggaggagtggggctactgagggcaggcgtgggccagggctggggcacagactcgggcccagcaaccacccggccctcaaggagcttaggctttagtgactcagaggccagcgacagcaacaggcacatccccagtaggtgccccatctggcaggtgaccgatcgcacgcaggaggagggacccggcgggcagctcagagccagggtcccgcggccaggatggggctgggacttggagctggacgcagcctactcgtccacccaaggcccacgggccccctaagctcctggctgttccctgaggcccgtggggttacccagacccctgcaggctgggcctgaggttcaggggcccgcagtgtttcctcacccttgccctggccaagcctcctgacagccctggggagcattcagcaaagtgaccttctgacccaaggtgagggccatcaagctcttgcctccctaaggccctcagatctgccctctccacctcatggtgggatccctgggtctttcaggcatgtcctcagaccctttccagcccgggccaggggagccaaacaggctgaacccggaggaaacaccatccttcttgggaccaggctcccggtgctgctgtgggagggccccaggggcctggacgagtgtctgcctcctgcatctgggcagctctgtgaaccagcatagcaaggagggtctccatgtggacataggtgggcactcatgatggccaaggaggaccctgcactctggaagagccagcctggtccagggccccagagcactcgggcagtggagcccagttgggagcccatgtctgcagtggtcgatgtcacctccaaacaggggtggcagagccctccatgaggggtgacgactgtcctggggcccctgtagaggatccgatcagcctcttggaagctcatctgttcccgtgctctgagctagggtcagcccactcaggactcctcctgcatcctgggctggatgggcccctggacttcatccacagccctactgcaggcttctcccgcctggctcttctggggccctaggctggacctgggagttctgggagctgctgccgctgtgaagagtctgccctcagaggccctgcctcactcaggaggtggaccctgcagctaccatgcagccccagggcctcgaaatgtccatccccggtcatacagcaccatctaccgccccctgctctggaggctgggtgcccgcggctgcccctgggagggactggctgccctgtaaagtccctggctggtcctgcagccaccccctttgcagagcccagggtgctacggctcactcctggtccccccctcagcacagctaggaacaggtggagtcacacagacagactttcctagaggagccgtgcagagccgagcaggcagctggaagtcaggtgcattcaggactgggagggacgtagatgaccagggcgagctggtgaaagactcctcagtggaaacaagcagtgcagcctccctcacttctggaggagatccatatatgagaaatgtgtcttcttctcgctcaggggaagcacagttcccaggcttgatacatagcaagggcacaggatggtgggggctggggtgccccaggcagcagggacccatctggcctcctgcatgcaggccaggtggcagaggagcaaaggaggtcgcatcccagcaggtggtcccgctggagcccaagtgacccacaggggagttcactgcatgtcaggacagtatccttggctggaggtctcagcggagagacctgagcttggctcttcccttgggttccgactgcctccagtagcgagggccttgccctgtccacggccagcccagacttccctcctgggccgcagacctgtccagctgccccgatgtctctgcctggacatcagtttctttctgtgaggagtccttagaggcatgcagaacccaaggctgcctgtagctctcatggagtgggaggagtgggtggaggaaagggggctctggggtgcatgagcctgagtttgcggatggttgttttgggtgctgccaccaggcaaacccacttcagccagttttcagtcctttcgaacctgtgctccatgggcctaacatgggtcccagctacggcttgggactgatcacccacaagggctgcacccccagaagtgggagagctcccaaagcaaaacagcccagctcttcccaacgagcaagctggccaggaaagacattgccgtgaccatgtttcctgcactgcggaccccacgctcttcctctggcacttgccgtccccttcccgcgccgcctcttctgccttgctaccaatccccaaagccagacactggtgccgtctctgcctcattgctcccgccctgcagccctgatgcctctcagctcctgccaccaggtcctgaccctcctgacgtggcaccagccacacctgcatgcatctcagtgccacactgtccccttctatccccactccttcctcactgacccaaagggctgttttaagaatgcacacagaccttgccctggcctctgggcacaaggtcaatgtctgggcctcatgggtaccccatagcccttgaatgctccagacccagcaaggacaagatctctgcccctgggctcctctgtgcccgtcagagataggctgggaccttggagatgttgggacgttggcagagagagagaggaagcacaagcagctctgtggcttgtcagttaagctcccagtggcaggttgagtcctggggtgcccggacactgaggtaaccctctcctctacttcttggggtaccccctgctgggacccaggctcccagggtctagcacactctcatgtctcctgaagtcctgcctcccagggctcccctggccccagtgcagcttcccctccctgtgcccatgcaccccagccctcccctctgccccctcctcagggagtctcctcagaaccccaaagccagaagggggtcatagacccctttagctctggaccctgcagcacaacctccttggggttggagaacgaaagtggcaggctgccttcttggactgggccgagaacaaagcgaggcaagaacaaaaacacaaatcaatatttcaataaattgtcttgccgcagcagcaagatcactttggctgctaagacgggctgggaacccaggctgaaccacagaagccagcatctgggaggagagaggtgatcggccagagtggatccagtctgcaggacgtggagaaggggctgcccactgcagggctcttattccagggttctggaataaagtggtgacggggaggatgcgttgttttgtctgcataactgatttcaatttgagccagtgtttactattaggtaggtgtctgtagaatccagatttcacgattgacctgagaaatctgatccagcagctctgggcctctgttcctgccagcactgggcggatgttgctcccttcagctgtgcctgggcacctgggtttgccacagtcctcgccactccttatcaccgacccccactctattctaatagggaaatattcctctgtaccctttctccttcaaaactgggaaaacacaagatggacttacttttcgtgcaaccagcctgcctcattgacttgtcacctgccttgctcctgtaggcgcttgggtttctagcatcctcccggtactccccacaagcccacacactaggatagcggacctccctgcacacccccagcctgcctcagcctggctcctcccgcagctctgtcctacacactagcctcattcctgcctctggtcctgatattggggcatgtctttctggctggactcttgactcctcctcaaagacttggccagggcccttctcccactgagaagcatataaactgcccccagaacatatcagctgcccccagatcagacgccatctttcatgggccagcgagtgtcctgactggggtccctgtggtcccccaaaggaggaagcacgtggctcagattctcttcgctgcaagtgacaagagcacaactcagaattggctttcacaaggagaggaacttcttcaggcataaatgacacccgtcagtggcaggcagccttcgtgatggccgccagtgacccagtctcttaatgtccatgccctgcggtaggcgggactgagattctatcaaaagcagactgtggcttctgtaggggaggtgccttctcttgttgtctcttgggtccctcgagcaggggcgaccgtgtggggtaaagctgacatgggtgacggccccaggaggggcccatacggtatggtgtgcaacagctcagctggggcccgccgtgaccacctgaatgagcctgggagctgacccgcctccggtacagccttcagatgagactgcagccccagtcttagctcgacagtggtctcatcctcctttaatccttggtggggggtctcctgtagtgcaggggggctccagccgctgcaggccccccacctcacaccttgcctactccttggcccgctttggttgtatgttcaccctgatccttcatggtggccaggaaggcgtggtgctgggattggccaggcctgcctgcccctgaagcctggggtctgactcagattaaaggaggggaagtttcacgaaagggaaacaagggcaggcagaagtcaccgcaacccaccagggcatcggaagggaccgtcccactacatggggcttaggaccctgagggcaggtgagttcatcttggacaggactcccttgacactgatgctgggagacgtgccctggaggaagcaaggcccctttccctggagcccagcaaggctaccgagctgtgctgggtgtcctggatggagacactcacactgcagcaggggccctgccaccaccctagcaaaagcgcttattagtgacctttgtgctgaccctctgatttggatttggactggcaatttttaaaaaatgtatgttaaaaagtcattcttgtttggtttttgattttgctcttactgttatttttaattggcatgtaataattgtacatatttctggggtagggtgtgatatttagacacgtgtatgcaatgtgtaatgattacatcagggtaattagcatatctgtcacctcaaacattatcatttctttgtgttgggaacattcaaagtccactcttctagctatttgaaaatgcacaatacattcttacggattccaggcgctttccggcactatagggcactaacgcttattcccccatcttgccgcacttttggatatgttaaccagccttggcaatccccagcccgctgccccccactctccaggaactactctctatttctgtgacatcaactgttttagcttccacgtatgagtgagagcgtgcagtatttgtctttctgagcctggcttatttcatttagcataaggtcccccaggctcatccatatctgggctgccaatcttaagttcagcgagtacaaccaaccacaaggcccacgctctagcaccgaatcacatccaccccgagtttcccttccttcttgtgccatcccaagctcaccccctagctggagacagtgagaagggacattctttcgcccgattcctccttcagaactgtgacctctcaaggctacccagaggcggatactacctggcagggactcgagatgagctgcaggggtcaggcttggatgtgatgcagatacccactcccttcctcctgtatcaattatagtaggtgaggttatgctacagaaacaaacacactttgcatcccagtggcttaaaacgaccaagatttcctgctcacgctgtatgttcaatgtgggttggcggaggattcgggtctcatcgtcactcaggtcctaggtgacagagcagccactgtctttatgttgccagatctcgtgccagaaaggagagctctctgaagggtctcaatgggaaattagatgctccaaccgaaaagagacatgccccacttttgctcacagctcattggccagagctagtcacatgctcttcctggtcatgatgggaacaggaagtgcacctccccttgccctcctccagcttcctctggtctgtccacttctatgccaatgtcccacaagtcttagtcacaggacatcacactctgatttatgacttatttcatcgggactcatggaaaccttgttagaatgagttatcttatctcccaggagcaggaaataaagtctttacaattaactctgtgcttgggacttgggaattggtctgccatcttgtcagtcattgactgggacccctgggaacgacttgtcttacctagccttgaattgtgctcccttcttctggaactaactggcttgctaacaataccctttgttgtttgttttgttttgttttgagacggagtctcactctgtcgcctaggctggagtgcagtggcgtgatctcagctcactgcaacctccacctcccgggttcaagcgattctccttcctcagcctcccaggttgctgggattacgccaccaagccagactaagttttgcatttttagtagagacagggtttcaccatgttggccaggctggtctcaaactcctgacctcaggtgatccacctgcctcagcctcccaaagtgctgggattacaggtgtgagccaccgcgcacggccaactttttgttatttatagacacaaagagaaatacgtggctctactttgtggatacatttatgcaagagaaaaaacacctgcatacgtagcttccaaggaatgcacatctctattttatggccagataaatccttaaaggggaaaagaacatgcccaggactcagaggggctctcggttctcttggagggaactacttcggtgtttggagtctatggtgagaacagaaaccaaaatgcctgctgtgaggattgtggaggaaaaaaggaagggtgccgctcacagaagccttgcttttgaaatgatattgtgtatgtcttatttaaggaggaagtttagggcagtgagttgaatctagattttggtttcagccttcttgggatccgatctcaattctcctacttcctagtttcatgacctgggcaagcttcttaacttctctgagtctcagtttcctgtccaagacaggcttcttagtcctgaagtctaaatgggagtgcctgctgatgtcatggtgcagagagagtgtgcaagacgagcggtcccgaggccaccctagctgtcaggtgtgcgtcatgatacaaaatggaatgggatggttcccgggggcttcccatgcatagttcctgtgggaatcatctgtgtatgcccttgttcttgatatggctgtttttctattaggttgatgccaaagtctttgccattacttttcatggcaatactgcgattacttttgcacccaccaaatatgtcagttgctgtttcttttcctccattgtgttggtttctgcaagtaccttcacacggggggaacgtataaggtgatctgcttcctctggccttgcacaccacactggaatttccgcctcccctgccacggaccctcccaaaactgtgagctctttggggtgaggtccacatgacatttgccttctgtggaggccttgcacggaacaggtgcctcatagaacaaacacagggacttctggaaatggggtagacggtgggactatgcgaggccttagatgacgtagagcttggcttctgcatctcacctgaaaactgcggtgactttgtgtggaaactcacgcaggtgagtgtgactggggaaacttttcttccctgtcaaagactggagcccagtgggagcaggtcctgagagtgaccgggcagggcctttgtaccacctggaacagattcccagtggatggggtctgtcaacactacagcctgctcggccccccactgggccaccaggcgccaacctctctcttccatttctctccatccccctgcagtccatgagcctcatcgagatcgggaacccctctcagagcctggagaatgtctgccgctgggcctacctccagcagaagccagacacgggccacgatgaataccacgatcacgccatcttcctcacacggcaggactttgggccttccggcatgcaaggtgagcctcacccatgcagggccacagaggcgtgaagctggaaatgagcccctggccatgcaaggggccccgggagccttggcccagcccagggaagagtgtcagggcagggaaggccgtggccaccttagctgggtgagggtgtggggcagtgcactgatggacaaatacatcattagaagagaatccagtgtcctgaattggacctatgtgtatagggacgctaatgtgtcacaaaagtgacatttcagagaagaggaggaaaacagcctaacaaatggtgtggggccaatttggaaagaaaggaggcctgtcacctccactcactctatagacagagagcatctcacatggattttaggtctaaataagaaacgcaaaataatgaaagaagataacgtaggtggatggctccatgttcttggagtaagagatgttttctttaaaaagagacaaaaggccgggcgcggtggttcacacctgtaatcccagcactttgggagtcggaggcaggtagatcacgaggtcaggagatcgagaccatcttggctaacatggtgaaaccccgtctctaataaaaatacaaaaaaattagcagggcatggtggcgggcgcctgtagtcccagctacccgggaggctgaggcaggagaatggtgtgaacccgggaggcggagtttgcaatgagtcgagatcgcaccactttgctccagcctgggagacagtgcgagactctgtctcaaaaaaaaaagagacaaaaaaaaccaaacaaaccatgaactcaatggaaaaaactgataaatagtagcacatttcaaaagtttgtgcattaaaggcacgctaatccactgggggaaatatttataaaaaaggatttatatctgaagtatgtgaagaacgcctacaaatcataataaggataataaagacaatccagtcagataatgggcaggagactcttatcaggctcttgacaaaatatgaatgagcaataaacatatgaaaaggcactcaacctcactagacattggaaaaatgcaattaaaacaatgaggctgggcatggtggtggatgcctgtagtcccagccactcgggaacctgaggtgggaggattgtttgagcccaggaagtgagctatgatcacaccactgcactccagcctgggtgacagagcgaggccttgtcttacaagaaaaaaaaaaaaggaaaatttaaaaacacaatgaaatatcaagacgcacctaatagcatagctaggttaaaaagactgaaactaccatgtctgggtgaggagtggatagctcccctcaaacacagcgcagccaggtgttgccctgaccatgtgatgagagtgctgttggctgttttgtcttggggagggcactaatggggagcagagctatcccctaggaggggaaaccgacacagcttttatattaagtgacctgatccctcatttaaaaatgtgaaattggctgggtgtggtggctcactcctgtaatcccagcactttgggaggccaaggcgggcggatcacttgaggtcaggagttcgtgaccagcctggccaacatctctactaaaaacacaaaaattagccagtgtagtggcaggtgcctgtaatcccagctactcaggaggctgaggcaggaaaatcactagaaccccggaggcagaggttgcagtgagccgagattgtgccactgcactccagcctgggcaacagagcaagactctgtctcaaaaaaaaaaaaaaaaaaaagaaaaaatgaaaggacagccaagggttaccagatattttaaaaaaaccaaaacacaagaaatccttacagcatgaaaaagatggaccaagatgtaaaacaaaacaaaaagtttgaaaactggctctaagagaaaatagagataatttagagacaagaaaagcatgtttttaaaagtagtattcccagaatgtttgagaaaatacatccataaaccctaagagttttctatgaaaaattagagaacaacaaaccatttgtataaaattatggataggatgggggaagtaaaaaattcgaaaggtagacggggcgcggtggctcacgcctgtaatcccagcactgtgggaggccgaggcgggcaggtcacgaggtcaggagatggagaccatcctggctaacatggtgaaatcccgtctctagtaaaaatacaaaaattagctgagcatggtggcgggtgcctgtagtcccagctactcaggaggctgaggcagtagaatggactgaacccaggaggcggaggttgcagtgagccgagatcacaccactgcactccagcctggacggcagagtgagactccatctcaaaaaaaaaaaaaaaaaatcgaaagctgaaataaaaagtcaaggccatctcccaatgggagcaaaagacaaaaagattaacatgagagaaaagttaggagacagaccctccatcgaggaggcacactctatctaataagattccggagagagaaaacagccacaaagtaaaataagagggaagaaaacaaagaaaaacataaagatgcgctttcagatctcgcaggctcctgtaatgctgagtaggatgaatggaaagcctcccacggaggcagatgcatctgcaagcctggcatacaaagggcaaagaggagatggcaacgttccactcaggcacacagactccacgctcgtctcaaaatctgcagagcaaaaaatgcagattttcctgtttattacaacgggaaaagacaagggttagatcacgatgcttctatttttaggcgcgtacaccgccagctcacccggggtcccagtggccctccttcccttctctgtggaacgcgtggcctcagggtctctcagtggggcatggcaggagtgagggcaggttggggttctgaaagtcagggctccatgcttggcaggcctctaggaagactcccaggggtacaagcagagacctcgtgtggcacccatagccctgtaggcacttccctatctttccaagccgcctccctctgctgagacaggagctggggaagtgaataggtctcattatccatcttcctcagtttgacgtggggtctctgcgtcatgaacttctgccaccctccccctggccctgggctgtcgtaggccactggcctcatcttctacggcggctctgacctcccagtccgcaccagccagccccctgctgggatattctgcagggtagtgtggcccatcggctgaacagctttgcagccttctgcggcattatggaaacaggtctagctagggtctcaaggaccccagagaaacacggggagacccaagaaacgccccccagaggaggtgggcttggagggtgtgataccaggcagacgaggggcaggatgcctctagcagagagaggtgtggaagcaggtgctgctcaggggccactcagtgaggcaggcagggggcagaggcaggtggcgtgaaagagaacggcaggcaggaaagtcaggtgtcagacaagccatagcaggtgacatctgactaagcagagggccccagctgcagtgtggctgttacaggcagaacggccacggggcttgtgtggtgacgggctgggggcctgctgtcagccagatgtcacaggctatgagctgtctgctgtggtgtcttctgagctgtgccagccgggggcagttgcctgtggtagagagggcattggggccttgaggagaagcagcgcctgggagttaggccaggcctcaccttcccggccaggctatggcagcatctggagccgcctcttgtctcctcccaggctatgctcctgtcaccggcatgtgccatccggtccgcagctgcaccctgaaccatgaggacggcttctcctcagcgtttgtggtggcccatgagactggccacgtgtaagtggcctggggaagggtggggcacagaggggccaccctaggatccccagccctggctgcccacttctcctctgtgccttaagagggacacgccctgtgtcaaagccacttggggtgtggtctcctgtcttcccagcgctgggcagtgctggcccgaggcccacttttgctgaaggaaccaattgaaggaggaagggcttgcctgcagactgagcaggcgctctgggccagctagagctggggaccttgccccattatcacatccaagcccccaggcagggtgggctctaccccatgttatagaggaggctcggaggtttggagggtggctcgccctgggttagaaacctggaggcagggaagccacggtcccccccaggtgtgcatgcccctcctggggacaggatacctgggggactgcccgctggacactgtctccccagagtgcctcggctttcaaattgcagcaggtagatggtcggtgccacccggctcagagtgggccaaggtcaggaggcccgttggggaaagatggggcaccctcctatcatcggggtggggtgggactggcagacccgtgtgccagtgggattcagccagctgcctcggccctcgcaggctgggcatggagcacgacgggcagggcaaccgctgtggcgacgaggtgcggctgggcagcatcatggcgcccctggtgcaggccgccttccaccgcttccactggtcccgctgcagccagcaggagctgagccgctacctgcagtgagtactgcccatgtgccccgtgggcgacccctcagtccctggggtcagctctgggagggtgcaagtccccatgcaccagagccagagccctccgacctcaggtcctctaagcttgtgtgcgggggaggagagagggcacacctgtgagagaagcctggtgtctggaggagaacccattgtcaggggtctgtccttgaatggcaagtgggcacggcggctaccctggggtccgctcaagccaggtcctggtgtcttacaccaaggacaagagatgcagcagggaaactgaggcagcacagccaggggccgggatgtgcaggtagggctgccatggcagctccagcaggggcctcagctgcctccagggctgtggatggtcagccgcgctgaaggctgctcgcggcaccgtgtgtcccccacagctcctatgactgcctgctggatgaccccttcgcccacgactggccggcgctgccccagctcccgggactgcactactccatgaacgagcaatgccgctttgacttcggcctgggctacatgatgtgcacggcggtgagtgtgcagccctgcagccgggaccctcccaggtctggggggaggcgtgctggtgtaggggcagctcccgggacagtgtgaggaccggcccagtgtggggagggcagagcggccctccagagtggcagcctgtccctctgcacccaccactccccaccccctaggcaccctgagcccacctggcaggcccagacgtggtcctaggcaggaagcacacgggggacaggactgtgaccagggtgtcagccaggggcagtgagagcctgcagaggtcaggagggctcccaaggaagaagggaggcctgcaggctaagcggaaggagagggcattcaggaagggagggccacggacgcagaggccacggacgcagaggcctggaggagagcgcggcaggcacaggagcactcgctgctctccagggccaagtgccagggctgagccgtcagaggaaccggccatcggcatggaggccacactgtgggagcttcagtgtctatgagcgtcttaatgctcgcctctgctgcatgaaggaaagaagcaaagtagtcccattttacagatgaggaaacagagacccggagaggctaggtaacctgcctgagcccacaaagcgagcaagtggtagagtcgagtaccaacgcaggagggccacctccttccaagactccctaaggagcacagtggactcgattctcatggcgatgggggctctggaaaggcttgagtaggggaggctcagggccacgtctgagtttcagctgatccctcagggacgtcctgcaggaagtgctatcaggacaggaagcagaaaggccagggaacaggactgtgaagtccaggggaggccgaggctgcagagagggcaggcctgtgggggtgggggtagggcttcgccagggtttaggagggaaatccacggcaaagggtcagcaggtgcccacctagcctcaggctggcacttagggcccagctgcccgccaggctccctgaggtgtgcagcctccaaagactggaggcagagaggcccagccgcgtccagggatgctgcagcctccacaccgtatgggcaaggtcttcaccaccccagaatcacaacacccaccagcctcacgggcccatcatgggccagtcccactggggcatctcaggttccagaacccgggggtgggtggcatccctgggaggtccctgaggtgggagggacctggcaagctatggtgctgtcttccagttccggacctttgacccctgcaagcagctgtggtgcagccatcctgacaacccctacttttgcaagaccaagaaggggccccccttggacgggactatgtgtgcacctggcaaggtgaggcagcatcaagggctcttggagggcagcagggcagaggacaggaatcttaggtgcccgggtcaccagggacaggccctgaagtgggggtgggggccctctcaggggacctctgctgccctctcctttcccccttctaattacccctcacacgctgtacgccggagctgcctccaccctgtgcttctgatgctggagcacacctggcatctgagagttcctcatggtgcttcatgccccccactcaggaatccccctttaaggagcaatttctggggtcctggcagccttcggtcacccctgggcactgtgggtcacctcacctggaggccagcattggagtcctcgggcccagcatgaggcttaacctttccatccccaggacctcagtgtttgtcccttgttgggcacactgtccttcgaggtcccttgatggctgccccaggcccacttcccaccctctggtgactcttgaaagaaggacttcttccctgttgtcctcccagaactccagacctgattctcatttgttcagatgaaatcacacacccactcctcagccagttacttgctagggggctggcatatgcagatgagctaagcctggatccccacccaggaaggctcagccccactgagaccaccttggccctgcagtgggggcagggagtagggagtggacaccggtgcacatcccagccaggcctaggacgcccccaaactgtatggacctgtggctccttgatggaagtctttggctcgggactgggccagctgcctaattttagtctctggcggagcttctgaaagaaacaaattcccaggcccatccttgaagacttttgtttggggtaggatccaataattgtttttggtgttcttttttaaactatggtaaaaattctcacaaaattcactatctgaaccactttacacagttcaggccgggcgcggtggctcatgcctgttatcccagcactttgggaggccaaggtaggtggatcgcctgaggtcagaagttcaagacaagtctggttaacatggcaaaatcccgtctctactaaaaatacaaaaattagctgggcgcggtggtgggtgcctgtaatcccagctactccggaggctgaggcatgaaaatcgtttgagcccaggaggcggaggttgcggtgagccaagatcgcgtcgctgctctccagtctggatcacacagcaagaccctgtctcaaaaaataaaaataaaagtgaagtgcaccattcggtggcatttagtacatttgcaatattgggcaaccatcgccactacccggtcccagagcttttcatccctgcaaaaaggaagcgccatttatcagtcacctctcccctccctcctcgccccatcccctggctagcaccaacctgctttctgtctctatagagttgcctattccggaatttcatataaatggaatcatatatatgtggccttttgtgtctgactcacttcattcagcagaatgtttccaagggccatcctgtgtggcatctatccacattccatttctctcgatcgctgaataacctcccgtcgtgtgggtgtgccacatttggtgtatccgtttctccacggagggacatttggttggtttccaccttttggccgtcgtgagtcacgccgctgtgaacatttgtgtataaggttttgttcgaagacctgggaattggtgtttttaagatgtgcccagacttaatgaagggttagaagtccgaagtgagttgttggtaagttgctgggggcccagtgaggccagaaccacccagctattccccttcccacaggccctcagcagaaggagcggggcagaacatctgccgtggccccagggggagcttcggaaaagctgagttggagaacaaggccagctaagcatggctccccgcccgccgcacccaccccaggcagggaggaggcagagggaatgggaggcaggccctgcacaggcatgctggttcagggagcaggagcaggagcaggagctggtggggcccccatatgtgtgtgtgtggctggcctgcaccccagctgattgccccctgcttttcctgcaaggtagaagtggggcagagggaggtctggtaaggacagtgagcagatgcaaccgaagtgtccccacctcacagagaccacccacctggccgcagcccttcactcattttggtggtaggatcctctgcatttagcccagtaagtgaaattgccttttatgtattaaagatagttgtgctgactgaggggcagagctggggctctgctcagcctcccctggttcccgaggagcacaggctggaaccgacctagatcaggattcggtgtggggatgttgggggaacgtggaagacgggctcctcccgggctgctgtcagaatccctgaatgtgggtctgtatgtttccctgtcctgtgcatcactgttctctcacgctgtgattttacatctggaaagcaatcatcttctctcccaccctttcccgcaaggaccctgagtggtcatgcccagcttccatttccaggttaggcaccgtcttgcccagttgggacaggaggaccactgcgtggctccttccatcctcctggctcctggttcctgcggccaccagtgacttagagtctgccccggccgcagccttccacggtgccaggacagctcacactccatcttcctcagcttcggctgctctaacagaaataccgcagactgggtggcttacacaacagagccttgttcttcgcagtcctggaggctgggaagcccaaggtcagggtgccagcaaggttggcttctgggaggaccctcttcctggcttgccatcttcctgtggtctcctcacatggcagggagagagggcatctctctcaggtctcttctcatgaggacatcagtcccactcatgagggccatcacctaacgcttcccgaaggcccccacactgggggttagggcttcaccatatgaatttgaggggacacacgcactcaggccacagcactgccttacctgggcccctcctcgcctgcaaccccacctgcgccactggctgaggggaacgccagccagcatttctctgggttgttcccctcccctccatgctcgagtgaggggagctttgggggcaagagatgaggtaatggtgccaggaaagagatggctaggaccccccaggggccgggagccaggcctgcctggccccagccagttcctgttggcccagcctgatgggaggagcccttgaccacctgcccacagtacccccctccgtctgggagggagaatccagagtggcggcctctgcagtccccacgtggctcagactgccacaaaggcaggtctgggagggttttagcaaggcatgagaatgaggggcctttgctaggaaggaaggggagatgtgggcacaggtgggcgctaggtggggcttgcccgagcgaggaggaccaggaaggaagcacgggaggggagcagctcaggcatggacacaggaggacggctccccagcaatgacctcagacacagagacctggtggcaggaattccagggcgcactttcagggccagcaccgtggggagagtgaggcactgcacagggatgcgacctcagcagagggctcggccagcgccacgtgcagctctggagcctttcagagttggcccaattgaagcaacgtttgaaccgcaaccctgaccagtcactggctatggctgtctgcaggaaaggggactgttcctgggggctgttcctggagaagaactcagctgtgagccatgagcagcccacatgctccacagcttgaggaataaacgacttggtcctgaagagggatctgggtggcacagcacagggtctgctgtgccaggcgtgtgttgaggagatggaggcgtgcacaggggcagggagggaagggagtgcggtctgttcagagccgccagcgctgcagtgctgctgtgctgggggaaggtgaccctgaggcgtaagtagaggccagtcgtaccgagtctttgatgccagccacagggcttgtcctgctgcgagtggggagccatggaggggctttgggagggaagcagaagtcgatttaccatgaagctcatgatgcttacgctttggggtcccttgctcacaggagccccttccgagaccctgggagaggccaagccatgtgtttacatggtcacatttttgtaaattttgcaaaaataagatattttaaccatacttgattaacagcacttctcttttcattcctgcttctcattgatacaattctcctcccgtgggtgccactgatacacttcccctcctgtgggtgccattagaatggccttgggcattttgctgctttggctacagagaaaatggattgagggcatttgttttggcttattgccatgattctgtctcttacaagtagagttaaatgattgtgtctgtccaggtgtaatagtagcttccagaaatactcgccacaccgctgtgccaactcatctagggtcattgcagaatacaggctgtgtgctggccatttccctcagatctttgcagaaaaaggtgcctcagcggtaccggaggttgtcactacttctatatgggcagtattttgtttgatttttaggtttgttttatagatggagtactttaaacacagatccaacatggatatttctttagaaaggccaagtgtaacaagatggtctgcttgttcaaaagctggcttaggccaggtgtgatggctcacacctgtaatcccgacactttgggaggccgaggtgggcggattacttgagatcaggagttcgagaccagcctggccaacatggtgaaaccccatctctactaaaaatacaaaaattagccaggcatggtggcgcatgcctatagtcctagctactggggaggctgaggcaggagaatcacttgaacccgggaggtggagcttgcagtgagtcaagatcatgccactgcactccagcctggacgacagagtgagactccatctcaaaacgataaataaataaaacataaataaataaaagttagcctagcctcacaacatatggatgacaataaatgaagggctctaaaaaatttcaaagacagaagagaaaccgcaatgaaagcgagatgcagaaatgttggttacgtctgaaggcactgttttcacttccgttttgaaagtggcttgggaatgtttccataaaataaggaagaaatgacagactgtgatttggatatatgtatcaaatataccttttatcattttctaatttatttattagaaaggaaagaaaattcagataaaaattaatgggatatgaaactaaagtagtagaaaatgagcaaggaaataaaaaaaataataactctgacttcaaaaagctcattgtcaccaaaaaagaaaggttttatatcaaaccaaaagcagttgctcattaggaggaagagacacatatcaaagaagttaacaggccttggagcgtttgacagtctcattaacgaagaggagtgaatctgatgaacacataggaaaatggttcagacatctttctgatttgccatgaaatgttgacaacatcaaagacgccagggagctgcgaacgctgccactgcagtcagggcgtccacggcaactgctactgagcgttgctcatccaaagagtgtcttaaagtcaagctcccacagagaaaacttgaaatgccctgaaaaccacatcaaggacggaaaccagagagcacctcctccaaatgtcatcatcctaaatgttcagatggcgtcacccataacttctttaaagtactgatcattttttaaaaagaaagaatttccctcaatatgccagggccaagtgctggccaactccatctgctgcctgtttggttggtattggtttttttccctaacagctttaataaggtgagatctatatttaaattcactttttaaagtgtacaggccgggtgcagtggctcatgcctgtaatcccagcagtttgggaggctgaggcaggaggatcacctgaggtcaggagtttgagaccagcctggccaacatggtgaaaccctgtctctgctaaaaatacaaaaaaattagctgggccttgtggtgggcacctataatcccaactactcaggaggctgaagcaggagaatcacttgaacccgggaagcagaggttgcggtgagccgagatctcgccacttcgctccagccgggacaacaagagcgaaacttcgtctcaaaaataaataaataagtaaaagagagtgtacaattcagtgattttcagtgtattcatagagttttacagccatcacaacaaacaagcgctggaacatttttgtcactctgaaaagttccaaaccctttagtagtcacctcaatccatcctactctcgcccaactccagatagccactcgtagccactcatcctcttgctgtctttatcgattttccaattctggacatttcatatcaatggaatcatacaacatgggacattttgcgcctggcgtctttcacttggcataatgttcacagggctcatccctgttgtagtgtgcagcagccctgcattccttcctgttgctgaatactaatccactgtgtgggtattcatcatttattagttgatggacatttgggttgtttccacctttcggtaatgatgggaaataccgcacaaacattcgtgtacaaagtattgcgtgcatgggtcgtttttcttggatgtacacctagaaatggaatcattggattttatggtaactccatgtttgacattttgaggaactgccagtttcccaaagcagcctgttttacattccaactggcaatgatgcttcagatttctccatatcctccccaaaacttgttattttatttgttataccaatcctagtgcatgtgaagtgatatatctcattggggttttgatttgtatttccctagtgacctatgatgaccgtcttttcatgtgcttaatggcaatttgtatatattttttgtataaatgtctatttagatcctttgcttattttttcatggagttatttatatttttattattgaatcctaagagttttttatttattctggatacaagtctgttatcacactcaccagtgtaagtggtctgcaaatatttcctcccattctgtgggttgtcttttcactttcgtgatggcatcattgaggtgcaaaagtgtttaattttgatgaagtctaatttatctatttttacttttatcacctgtgcttttggtgttgtatttgagaaaccattacttaggtcaagaagatttactcctatgttttattctcagagtttcagctcttacattgacatctgtgatccatttttgagttaatttttgtgtaagtgtgaggaagatgtccaacgtcattcttttgcatgtgaatatccagttgtctcagaaccattcgttgaagagactattccttttccattgaattgtcaaagtttaacttatcaaatgtaaaggtttagttctaggcttttgttctattccgtcggtatatttgtctgtccttatgccagggatacactgtcttgattactgtagtttaatagtaagcttcgaaatggtgaagtgtcttcccactttgctcttttttcaatattattttggctattctacatcctgtgactttccatatgaattttaggagcagcttctcaactttgcaaaattctagtctgcattttgataggaattatgttgaacctgtagatcagtgtgaaagtatttccattttaacactgatcaatgaacattgagatgtctttccatttacttagaacttgaacttctttcaatgatgtattgtaatttttagtggacacgttttgcattccttttgttcaatttattactaaggttctttttttctttttggtgctattgtaaatggagttattttcttaatttcatttttaaatcatttattactagtttatagaaatgcagttgatttttttgtatattggtcttgtttcctgaaacctcagttaatttgtttgttagctttaagttttgtaggggattctttgggattttctatacagaagatcattttgtctgaaaataaagataatatactgttttaactgccattttgaaagtggttccagaatgttttgataaaataagggagaaatgacagactctgattggaatatatgtgtaaaaagtaccttcttttattattttcaaatatatttgttaaaggaaagaaaattcagataaaaattaatggaatatggaactaaagtaataaaaaatgggcgatgaaatcaagaaaaatgactgacttcaaaaagctccttgtcacacacacacacaaatctattccgttgcttttcgtgtgcttaatggctatttgtcctcacgtcagcagggacgaaagggcaaaaagggacctcgctagctccctctggcgcttttataaggcccccaatcccatccaggatgacctcatggcctaaggatctccttaaggccccacctcttaaaactgtctatgttcaagttcactgattgcatctgctgccagctcaaatctaccactgagccagctaattagtttatcttttaagtttttgtaccattcaactccagaatttctatttagttcttcttttttttttttttttttcgagacagagtctctgttacccagcctggagcgcagtggcgcgatctcagctcactgcaacctccacctcccgggttcaagagattctcctgtctcagcctccgagtagctgggaatcacaggttgtaccaccatgcctggctaatttttgtatttttaatagagacagggtttcaccatgttggccaggctggtccagaactcctgacctcaggtgatctgcccccctcggcctcccaaagtgctgggactacaggtgtgagccattgcactcagcctctattcagttctttttataatttctatctctttactgagattctccatttggtgacacgtcattcctgtactctcctttagttctttagacatgatttccttttgttctttaaacacattacttatagctgctttgaaatctttgtctgctgagtcagacatctgggcctcctcagtggtagtttctgtcacctgcttcatttcctgcgtatgggtcacactttcctgtttcttttcatggctcagaaagtttccttgaaaactggaaactttagataatacattgaagaaactggataatgatcccctgggccttgctgctactgtttgcttgttgattttagtgccctggtcctgctgtttcaatgaagcttatgtcccctgcagtgtgcagccactgatattgctccccagaggtcacagccttggtcatatgcagtcaccctgactgcacccctgcccctaatgccctggggtagtggcattagccaggctctttgactatctctttcccagatctttccattaagcttctggtcattctgcctgtattgctatcacacccaactgttagccttcactaactgctagctgctactaacagctagtgcgattgattgctgtattgtttttgacagtgtcctggggtatatagcttgctctacaatatgacctaattaaattctagacctttcacaggggcagggtgttgccagtatctgaggtgtattgagaccttcaggagggctcttagctgtctttgtccctggttctgtctgtttaacttctacaggttgagcatccttaatctgaaaatctgaaatccgaaacacttctggttccaaacgcttctggttccgagcatttcagataagggacactcaacctgtagctggtttaacattttgtttgttgctattaggaccattggcctcctcttaattgctcactgctaagacccttgttgtttttgacagtgcccttagacatgaacatcctccacgctctgtttcagatcaaagtcagtccccttagggagagctgtgaagccttctgttctgactctccctctgggcaggcccctgcaccactgagccagagctaaaggagcagggtcagtggcctgcttctcccagagtgacattcctggcctacagactgctcactagatgggaatggtagccactagtcttctgggcttgcccctttcaacatggaacctctaccctataagcaatctggggaggggctatcaggtccaccattcttggcctggtgtacctggagcagagcttgtgccctatgagtggggcctgggtgggggaagggggccccaggcctcttggccatcccaccagagagagactctgcaacagagttgagagggatgacaccagtggcctgggtttctcagtatgaaactgtagcctcagaccgggagcttggagtagaggcagccccgtcttcttggcagtaaagcttctgtcacactgagctagggcaggaatgggggagggctgtggctccaatgccatagacttttgcttttcttaccaagatttaatagattttcttgagaaaaaaaaaaagcttcttcatttgttgtttagaccttaggacaatttccagagactttaaatggctgctttttaaaaactaattttcgtcagttactggggagagggttcaccaacctccttacacttccattcaaagtttctgtttgctgcctgtttttgtaaataaagtttacaaaataaagttccaataaggaacacagccatgtccattcatttataggttgtctatagctgctttcaagctctgatggcagaattgattaattgcaacagagattatatagcctgcaaagtctacaatagttactctctggcccttttacagaaagaatttgctgaggaatggtttgctgagaagagtttgccaaggaatggctgcgttctctttctgttctctttgtggaaacagtgctacaaaattaggtcatacaaagaagggttaaagagtatgcagtcggccgggcgcggtggctcacgcctgtaatcctagcactttggaaggctgaggcaggtggatcacctgaggtcaggagttcgagaccagcctggccaacatggcaaaaccctgtgtctactaaaaataaaaaaaaaaaaaatgcaaaaattagctgggggtggtggtggacacctgtaatcccagctactcgggaggctgaggcaagagaatcgcttgaacccaggaggcggaggttgcagtgagccaagatcgtcactgcactccaacctggggggacagagtgagactctgtctcaaaaaaaaaaaaaaaaaaagagcatgcagtcggaactgaaggaaaagttctgtcagtcaatgtattagaagtccttgttctctgttttttggttgtttggtcattgtcagttttaaaacgtttttgtgtgatgtattttctcatttcaagtcaataacccattttgcacctaatttaattctttaattttgcaatcttcttcttaaagtgggtcccctaaactgtagacgcttcctccccctagaggaatgagagcactgtgatcagattaagatgtggaatcatttttcctacatgccagcattggactttattcctggtttttaccatgtcagcatattacttgtcccttttttccatagtatttcctctaaattgccttttttgcttaaataaaccttgtatgtcttgcagtcactggcctgataggccagtggtatctttataaatgggctgtgtgtgggcacccaggaggcatctatcctggcggcgtcatgtggtgcagcttccagctgaggggacacagagctgctagaaggcaggagggtgggtcagcaagcgggaggcagggcaggccagcccctcactgtgcctcttattgcctctggccaatgaggcctgtcttctgggggctctgagcatctaggggcgaggagggtgagctccccctgtgccccagagtggggccaggacgtgtcccagacactgcaggctgcagagcgcaggactgtccccacggcccggtgtgagggtgagtggagggactggcttcctgtctttcagcattgttttaaaggacactgcatctggctgacacctgacatcctcaaacgggacggcagctggggcgcttggagtccgtttggctcctgctcacgtacctgtggcacgggcgtgaagttcaggacccgccagtgtgacaacccacagtgagttggccccatgtccccctggccttgctgagtggcagctgagggtccaggagaccctctccagccagccctgtcctggagggccctgtggctgcacaccagttctggagaggtgcagggcaggctgccccgcctgcctcaccctacctgggagggggtgacggctcaggggacgcttagctctgcctcttaccccttcccctggccggggcccacagcccacctgcctgcagcccactctagacagatttactctgtctctcctggccacgggcatggaggagaggagggaggaccgagctggggaaatgggggtaagcgggggtggtctctcagcccccccgatgctagcacctgggcagctgtttgcagccaggtgagggcagggtcgggatttgtcatcagtgtctggctgcccaggggagggacaacctgtagagccggcccatgccagctgcatccccatgctcagctatacctcagccccacccgccacgcaggccccatgccctgtgctgtcctcctgccccttctcattcctcccacctcacccccacacaccccgtaaatatctcccgggcccgtgctccctcctcagcccgcagccactttctcatccacaccctcctctccctcctccactgcctgtctcctcctgcctgaacgctcaccctggcctcacccagggagtgtcccgggggggctggcatggagggagaaccctccacaaacatcagcgttacccccgtctcccacctgcgcagcgggctcttacgccgcaggccctgcagctgcttagacacacagagcttcggtctttcctttttggcctgtctggtattttaaagattttgatttgcctgaaaatattgacaatctgtaatttcacattagaaaaacaaacaaaacagatttccagcctccaaattgggcatcacagatgcacagccgggcccagttaccagctggcgggcagggctccgggtgcgtcccggctgctgcgctccggcctctgcggccgctcctgggtcctgttcactcgggctgctctccttgctctggccaggcccgagctggaccctgcggagccagagaggacccgcagtcacggctccgcggagggatcccgcagtgggacagcctccctcagcagcacgtgtgaacacgctcgtgcatggatccctctcctacccctgctgtcctcctgccccaggctccaggctgccctcccggccagaagcagacagggagccccgtggcccctcctcaagcacccctggggcttttacgccagactcggaaagagattgctgggcatttagaacctcaagaggcagtgtgtgggttggtgctgttcccagtgaagcgaagacgttgcagaaacgcagcccgccttctccacagggagaaaacccagcggccgtgatgcgtctgctttgtgccaagacacttgctgagaactgcagcaccgggactctggggcctcagcatgcctctttctgtgctaggctcggtgcccagggccagctgcagaggagactcactcagctcctgccgtgctggggttttcgccctgtggggaacacagaacctaaacacccaatcacagcttcctgttcatctccaagcccaggcatcagtgctggggaggaggtggcaccagggctgtgagcagatgctgcctccccacaggaaccccaggagggaggatgtggccatcctgtcctgtcctttcaagagcttcactctgaggcctgacaggctggacaactgcccaggtcttacagctaggacatggcagggcaaggtccctttgctcagcagagctgccccccggacacctgagacttagggatcccccctaaaaagatctcacaagggcacccgggtgctgcctctttccaatggcacggagcggcaaggcctttgctttctcctccagcccggccaacgggggccgcacctgctcgggccttgcctacgacttccagctctgcagccgccaggactgccccgactccctggctgacttccgcgaggagcagtgccgccagtgggacctgtacttcgagcacggcgacgcccagcaccactggctgccccacgagcaccgggatggtgagcccttctgggaggcatcagtgggggctcagcaggcaggccctagggtgggcagggtgggggcttgtgcctctgatcctgcatggggcaaggctgccgcgaccctgggctggcaggagagcccaccctggctggtgtggctgccctggcccactcctgggtggggcattaaagttcctagcagggctgcaatcccagagcaccagaacaccccagagtagctgaggacatggaagaggtggccgggctgcgggctcggcaggggccgggctcctgcagttcaccgtgggtggacgaggcttgagctgtgtggtcagctcagggctgaggccagggctgaccctgccaaggaatctggtgacctctgaccttctctattagtcgggactctcagttgcgagtgtcagaaagttgactccaaccggtttcagcactagaaggcatttattggctcagggacctgaggagtctggtggccttgggcatggcagtgcttgtgtggcagctggggaccctcctgggacggactgtaaacacagtccttgtttctcctccatggctgttgccctagcccagcagctgctgcctcatgtgggccagtgcagggttggaggtgacacagcagatggggtccccctctggcggaggccacagtctgggggcccagcgttttagttgcctcagataaaggctgagaagggaaggttccagggacctgagtctgaatcgaggcaggctggcctcattctggatttcagagattgactgaaaaggattatttactttttttttttttgagacggagtctcactctgttgcccaggctggagtgcagtggcgtgatctctgctcactgcaacctctgcctcccaggttcaagctattctcctgcctcagcctcctgagtagctgggacttcaggcgcacgccaccacacccggctaaatttttgcattttttgtagagacagggtttcaccatgttagccaggatggtctccatctcctgacgtcatgatccgcctgcctcggcctcccaaagtgctgggattacaggcatgagccactgctcctggcctttttttttttttttttgagatggagtcttgctccgtcacccaggctggagtgcagtgtgcagtggcgcagtcttggctcactgcaagctcggcctcctgggttcaagcgattctcctgcctcagcctcccaagtatctgggattacaggcgctcaccaccacacccagctaatttttgtatttttagtagagacgggtttcaccatgttggccaggctggtctggaactcctgacctcaagtgatccacctgcctctgcctcccaaagcgctgggattacaggtgtgagccatcttgcctggcctgaaaagggttctttagatagcaacccagcaaacagacatttgcagcctcggaggtctccaagcggggcctcggggatgtgagagccgggctgcaccaacagcctggctggcttggttgggaaaagctcttccaaagtccacaaccaccagggtcaaaggcttaggagacacagagacaggaagggggctgctgtcacccacccctttccctctctgtctgccctggagggtgggccacgtggggacccttgtggaaatttctcctgcttggtgcctcctttgcacacacatggggaagccatcagggctccttgcagacccccagctgcttcccttccagccaaggagagatgccacctgtactgcgagtccagggagaccggggaggtggtgtccatgaagcgcatggtgcatgacgggacgcgctgctcctacaaggacgccttcagcctctgtgtgcgcggggactgcagggtgagtacacagaggccggcacggggggctaccgtgtcaagtctcagcttcctgggtactgacctcccccttttcggggtattggcaagatgcatgaggtgaagcatacgaagtgtcagaaacaatgcccggaccagggcaggctcttggcaaatgtctgtttacccctcccctgtgctgggagcctgagacttgagtatgcctaggactcacctggagagtttggactccacctcagacgtcctgattccacaggtcacggtggtggcggcctgggagcatgaatttttaggagcatcccaggtgatttccaatgcacgtgacctacaggggacccttgtgaagcaggccccatccttgcaccctgcagggcactgggcagcttcttgctggatctgggtggccactgtgagggtcactggtttggtgctttgtagaaatgccctcctctgttttcttttattatgatgcctttggcttcaatctttggctgtcaggaaaaacaatctcgtgtcacctcgccatgtgacggtgacatgaacatagacttgtccctgccaggctcccccgaaaacaaccggaagtctctgcttagggcttgtgtagacaggactgatggcaggagtcgtggaggctgactctggcttgaccttcctgagaaacagccgcatcggcaggaaggcacctctaggggagtgggcgcagggacagcggctgggggctggagccgggagctggagctggagtcgggagctgggggctggagccgggagctgggagctggagccgggagctgggggctggagccgggagctgggggctggagccgggagctggacccgggagctgggagctggagccgggagctgggggctggagctggagccgggagctggggactggagccgggagctgggggctagaggcccggagctgggggctggagccgggagctggagctggagtcgggagctgggggctggagccgggagctgggggctggagccgggagctggggtctggagccgggagctggacccgggagctgggagctggagccgggagctgggggctggagccgggagctgggggctggagccgggagctgggggctggagccgggagctgggggatggagccgggagctggagctggagccgggagctggagctggagctggagccgggagggtgctcgagggctgctctgcatttgctcctgtgacttcggcagggccgggaggctgggctatacagctggctcagagatggcgacaccaaatacgccaaaacaagaacaggtggtgtctgctctgtacccttgggattttaatttatggaggtgacccagtgaggacgtggggaggccaatgtcactgagagggctcctgaggaaggcagggcagtggaagggggacagctcaggaatggccagtttgaatcattccagtgggctctggagtttagggtggtccccagtagcctggtacccaaccctgggatgagttagggtgcaagaatcttggtttggtatgtgagtcctggataaaggaggtgcttggggtatagactgaagactggctggcttgcatgtgaaaggtgtgtccccaacccagtgctttgctgtcccttagaactggatacccctgggaggtgtagtctctccccagacaggaagatttttaagatgtcaaaatatcaagacataggacgttttgaaaaacaaaaacataattaatacaggcagcaagcatgggaaacagttgtagtacaagtagcttcagatggcagctgtgatcatggttgtaaacctaacggggagggaagatcactaatgcactgtctccgtgggtgtggctatcacgtcactcctgacatgggtattaaagaaggataggggctgggcgtggtggctcacgcctgtaatcccagcactttgggaggccgaggcgggcagattatttgaggtctggggttcaagactagcctgaccaacatggtgaaaccccgtctctactaaaaatacaaaaaaaaaaaaaattagctgggactacaggcagcgactcgggaggctgaggcaggagactcacttgaacctgggaggcggaggctgcagtgagccaagatcgcgccactgactccagcttaggcgacagagcgagactgtctcaaaaaaaaaaaaagaataggttaaatattttattaatgttgattttgacaggtaatagcaggttgctcaattttgcataattagaaaacataaatattcatgcagaacctaatactgggtcaaaaaataatatccaactggattctgtctgttaaagaatatcaaaacttggccgggcgcggtggctcaggactgtaatcccagcactttgggaggccaaggcaggtggatcacctgaggtcaggagttcaagaccagtctggccaacatggtgaaaccccgttgtactaaaaatacaaaaaaaattagccaggcatggtggtgggcacctgtaatcccagctactcgggaggctgaggcagaagaattgcttgaacccaggaggcagaggttgcagtgagctgagattgcaccattgtactccagcctgggcgacagagcaagattccgtctcaaaaaaaaatgtaaaaataaacagcatctcctgcttgccaaacataaatgttcatcaagccagggacggtgcctgcctgggcctcgatgagtcccctgcccaagaccagccgcgtgcacaggggcccagacggaaactgccaggtcgagacactgctgtaggtggcaggcaaggtccgtttaactgatgactagacgcactctgattttggagataataaaagatgaggccaggcaaggtggttcacgcctgtaatcccaatgctttgggaggccaaggcaggaggatcgcttgaggccaggtgttcgagactgggggcaacatagtatgaccctgactctactagcaggacgtctcaagtgctcactgcctcctcccccaacagaaggtgggctgtgacggtgtgatcggctccagcaagcaggaagacaagtgtggcgtgtgcggaggggacaacagccactgcaaagtggtcaagggcacgttcacacggtcacccaagaagcatggtgagtgggtccctgctctccaccctggagcctggatgcctgcagcaggctcatgcccggacagctgagggcctgactcatcctggggctgtccgggcttatgactgttctggggagggggagaggtctgtgacactgagggggagggagaatcctaagtcggggacagccccagctgggtgccagggtgggtggggaagaggagagtgggggccggggtcacaggggttagagtggagaatgccagtatatgaggatgcccgggttgggccttaaagactagcctggaggcagcagctttcctggtggcccctctcaggtgggtcctcaaagccagagaaataccagggtcctgggagagcctccggaggagctgccttcaagagcgaggcccctccttgcatggtgcgaatttgagcggcgccttcccttctcagttttctgtgtctttccacatcaaaaaaaggttacatcaagatgtttgagatccctgcaggagccagacacctgctcattcaggaggtagacgccaccagccaccatctgggtgagtctcagagccggacaacttgacgtcctcaggacctggctcctctgggatcaatgggcagagtgccaggggtcaggggtcaggggcccgggttgtgcagccatgacctgagccagggcagcccctccccaacctgtccctctgctcagcccacctgggccctttcccagggtcctccccttgtggagaggccagggtttgggatcagagggctccgcttggcagcagctatgaaaggacatatatgcaaaacatgtgtccctcagtctacaggatgactccctgtcccctgttctcacagtcggggcgggaaggccccctgccctcgggaaggcaggcagggtctgcaggcagcagggtcctgggcagccctcccatcccctcagcaaggccagctgtcaggtgggtgcacacagtgcacttacattttcaattcgtttaattttaaattcaagagattccagctaaaatagggatcctggtatctcctgaaaatatggatgttctcacacctctcggtgcccctttccacgaagcagcgctgcctgggagaccacgccctcccaggccacgcgggaggctctcaggacctgtccaccctccctctgaaggtgcctgggccctaccttctgggaattcatgggccaaggtcagaagtgataccagggactgctggggcccctggataagtcccttccccaatctgagccccacattcatccccatccccaggaggctggacaggattggggctcccacgctgccgtggaccagcacccacgctgcctgacaaacataccatgcccttttattttatctcccttttgttttattttattttgtttttatttagagacaggatctcactctcttgatactcatttttctttcttactttttttttttttttttttttttttgagtctcgctctgtcgcccaggctggagtgcagtggcctgatcttggctcactgcaacctccgccttctgggttcaagtgattctcctgcctcagcctcccaagtagctgggattacaggcgtgtgccaccatgcccagctaattttttgtattttttactagagacggggtttcaccgtgttagccaggatggtctccatttcctgacctcgtgatccgcctgcctcggcctcccaaaatgctgggattacagctgtgagccactgcacctcgcctcttaagaggaaactttcgactgctaccctaaatataaaaacctgtaccacttgcctgaagcaggtgaacagaaaagtcagtttctgaacaaaaagacatttctgtcccaacgctgcttcctgccaccgcctctggggctgaggtcgctctctgtggaaagggagcaagggccagagagaaggcagggacgtgtggcaccaagcagaggctttgtttgtgagtggacagaattacaggggacgtgacagggaatgattttctcactagtgccctgtctgcggccccactcacatcacccagctgccccgcagcagccaccccccacactgcagagagcatggggcttcctggctagccaggtcctctgctcctagatgacctgagtgtcacccaatcaggccaggcctcttctggggctgtggggagctgctggggcctcggctgggccatggtccctgatggggtgggggttctgctgtttcagccagacatatactcaccccatggcaggaagccctactccagcagggtcatgtgctcgcctgtccagcagatgccctgcaccgcgtacagacccctcccagccatcctgccccgggtggcctctaagcgcccactgagtgctcccaatagggtatgggtaggtggccttgacggctactgagtggcttccaaggggagccggcacctccagggctggtgggggcagaggatgcgagtggagggtaatctggtcccgagggagcagtgatgggcaagcagggctcccagagccatctgggctgtcgtggcacagaggaaactggccgggggcagccagagagacaaggggtccagctagctgcccccactccccgaccagcccaaaccagtgggcctgggtcctgctcttgggtgaccacaacgggggacttggtcttgccattctcagccgtcaagaacctggagacaggcaagttcatcttaaatgaagagaatgacgtggatgccagttccaaaaccttcattgccatgggcgtggagtgggagtacagagacgaggacggccgggagacgctgcagaccatgggccccctccacggcaccatcaccgttctggtgagtccaagcagggctgggcccagggaagggtgcgggtggccactgggggagggatgggggtgcctgggacgctgagcctcctgacccttcaggtgacactctgcgtggcccctttggcctgcctttggcaccaaggggctccgacttggtcagagccaggaagggacatgcatccacgagccggggctctggaccccacatgacccctaggtgaccttgggcacactctccctttgagggtttcggtttcaccatctgaatgacattcacagctgccatcagcatgctcgttcgagtgtgctgttacattggaatcggtgacactctgggaggtgacgctcagggtctgggaagctagatgcccagacccaggttgagctggactgtgtctctaagcaggatgggaccccagatctcctggttgtaggaaagtaccacgggggctggattttcaaatcactttctttttacctggttttgaggaggtcagatcactttttaaaatgtaatttaactgcatagggatatattttatttgtcaaaaaaggtacatatcacaaataaggctcccatgctctggagcccctccctaaggtgggcatgctggcattgggattaatccaccagcccccagcgctccacacgtgggtgcacctgtaagcaggtgcagcagtgagccaggtatgccccgtgtaccccctggcaccctgcctgcctcgcctgcagtgacttctggccccctggacgtgcctttggtgacctgcctgcatcagtgtgtgagcagctggtcctcggcactcacggtttctgtatttgcaaattcacctgctcactaaaattgattcgtgagccccaaacggacacgcacagagtggtgaagtgtgagtcgcctgccacacgtgttcccagcggaggtgggagcaactcagcacgctgtctgcttgtttctgctctcatcccacaaacaggggttctttctgcagtctgttgagtgtcacatacatcacattttgtgctattttgggggcgatttcgctgttgaaaatcaccctgagcctgttgctgaagtgctgtccagtgttcctaagcccaggaagcagtggtgtcttaagaagaaaatacatgtgttgaataagcttcgttcaggcatgggctgcagtgcgattgactgtgagttcagtgttaatgaatcacagtaaaaattaaataaagtgtctttaaacagactcacacataggccaggcgcagtggctcatgcctgtaatcccagtactttgggaggccgaggcgggtggatcacttgaggtcaggagttcaagaccagcctggccaacatggggaagccctgtctctactaaaaatacaaaaattagccaggcgtggtggcgggcgcctgtaatcccagctactcaggaggctgaggcaggagaatcgcttgaacctgggaggcggaggttgcagtgagccgagatcgtgccactacactccagcctgggctacaagagcgaaactccatctcaaaaacaaacaaaaacaaacaaaaaaataaacagactcacacataaaacaaggttatatattgatcgggtaacaaaaatgttgagacagaggctcacaggaacctcaccctgtgccccctggggtaatggctccctattcaagaatttggtgctcggggcgacttcatggaatgtaactgccatgaatgatgagactcctctggagtcggcctcagctgccgttcctaagctggctggggaggaagcatggagggcaggtcaggcacatcaaggctcttgggctggcacaggtcatcccggtgggagacacccgggtctcactgacgtacaaatacatgatccatgaggactcactgaatgtcgacgacaacaacgtcctggaagaggactctgtggtctacgagtgggccctgaagaagtggtctccgtgctccaagccctgtggcggaggtgagggggtctcgaagctggggacctgggtgacatgagggtgaccacgagaaggtagggagcatccctggggtggggccagcgtgagcaggggccgaggagccacagcagggacctttgcctgggtgggcaagggcttagcggcaatggaggggccggtgggtgggcaggaaggggggtgctggggcattgggtcaaatgtggccaaagggtgtgtggggcatggaccctgtatttgtgggcctgcttcagtgtgggggtgacaggctggcctagcaagaggttgatgtgtggacacctcagaaggatcatgccgtggcattggcaggatcgcataggcaagactctggcagtgcagatgacacctccagaggcttctctctccgttcactgggaaaagcctcccagatgtttctgggacagggctgagcacagaggggtcctacccactctggaccccagagagtctgcagttgatgggacataggacccagaggcagacaggaagcgctgatctgttctgcgtgctcctgggggctgggcgataccaggcaagtgaccaggacagtcctccctcgatgccatgctgggcccacacctggaggacaaggagctcaccaagaggtggggtcactccctggcccaggcagatggaagggtcctcttccagggcccctgggcacccccggccccacaccgggcctggatttcatcagcgcatccacccctggtgattcctgaaatctcctgggcctgtgtgctcttcccatcttcctggccattccccggtcctggcacccaccttcctctggactggcccttgtgtgtccactctcaccccaaagtaaccgtttgagggaacacatcagacaatgtctctctcttcctggtgtcatagtcttcaacagcttcctctgctcttaggataaaaaacaaaattctcctcatggcctccagggttggggcaacttgttggcctctcccagtatatctccaccctgtgcctcgcccccaggtcctggccacgccggccttaagggcttttcctggatacacaccatgtcccaccttggggcctctgcgcaggcttctcctcgcctgagcccctccaccgccctgccaccacgtcagcctccccagcctctgcttcctgggatgcctccaggcacccagaggaggtcaggctttatctccatgctttctttggtcttacccagcaggccagggtttcgaagcctgggcatcactgacattttgggctctgtcactcgccgccatgggggctgtcctgtgcacggtggggtgtcaagcagcatccttggcctttgctcaccagatgccagtagcaccccttcccccagttgtgacaaccaaacatgtcccagacgtggccaaatgtcccctgctggagaaaatcacccgggttgagcacggctgctctgggcctgtgggaggaagcatgcgggctgcgggcccagtgcttgcccggctcctggcttgcaccaggcctgctgggcatgtgaggtcaaggtagaagcggtgcctagcagtagcaaggaaatagggcctccactctgacccaggagcccagtgagggagaggcagcctaggggagaaaatggcctctcctgccctctcgcccctccacccgggacacaccaaggcctccccccagccagccgcaggctcggtgccctgcccacccttattgtcatcacaagggtgagcaggaaaacgaggccagcactgctggtgcagcccacccctccttgcaccctcgggcagggcatgctgccccaccgacccccgtcgagctctctgccttcagggtcccagttcaccaagtatggctgccgccggaggctggaccacaagatggtacaccgtggcttctgtgccgccctctcgaagcccaaagccatccgcagagcgtgcaacccacaggaatgctcccagccagtgtgagtgcccccagctcgggctcccactagaggagacaggccaggggccaccaggggctcccgtgcttggaggtgtggggcctgggcctggcatcatccgaggcatttgaccaagtctctctcaccacatttcatggaatctaagatgctgcagggcagaaggcgcaccccagcttcaaacccgccaaactgaacagcatcttagagatgacaagaaacagggatgcccagatggggaaatgggggttcagaggcgcagggctcgcctcctggccctgtaccacggggtagatgtttcttaagcagtggctttgacgttcaggccctggggctgggcccagctgcgtttctgggtccagggacctcagtggggaagacagttgggaaatgggcaggtgggggccacataggacagcgtgctgagggaatccacactgctcttgagctctgccgagaaggatttgtgacgtcagcagaaggtgaggccaggtagcagggcccagaccctaaggaggctgggaaacctcttcaggctagggacctccagagccaccagctccaccagggcctcccagtggtgacatgcatgggactcatggtcagtaggacctggggcagctgagcctcagtttcccctctgtgcaagcctggacagccagcatcttagtgagaataagagaaggtgcaccggggaggggtgcaggctgccctctgtgctcgctgtctacctgggctgcagggagcggcgctggagctcagccaggcaggttctccaggtgctgcggaagcctgactgtgccccgctctgccctggcaggtgggtcacaggcgaatgggagccatgtagccagacctgtgggcggacaggcatgcaggtgcgctccgtgcgctgcattcagccgctacacgacaacaccacccgctccgtgcacgccaagcactgcaatgacgcccggcccgagagccgccgggcctgcagccgcgagctctgccctggtcgttggcgagccgggccctggtcccaggtacgcaatcccccgatcccgtgtcctcagctccaaaactgagggtggacaggcatgcaggtgcgctccgtgcgctgcattcagccgctacacaacaccaccacccgctccgtgcatgccaagcactgcaatgacgcccggcctgagagccgccgggcctgcagcagcgagctctgccctgatcattggcgagccgggccctggtcccaggtaagcaatcccctgatcccgtgtcctcagctcccaaactgagcttgggtgggactgaggtgaccagagcattcccctttcggcccgtgggcctggatgtagctcctgtcctgagccacatcctgtgggtttcacggcgccagtggctgccacgtggtcagtgctgtactaagaaaccagtggaatgtgtgtcttcactgcacaggcagaggcttctgcatgatacggggtctggaatcccaggaaactgagggtagcccgggctccgaggcccagtaggatgttcggggctccaggatcctaggggacgcctgggtctcatgcagaggtgggaggggacaaactcgcaggaggggagaagagcagggcgtgcttaggcttgtgctgggaggaagaatgaggatggactgaagggcttcaggggtggtcctaggggcagggcctgagagccagctgaggccaggacagagctgacgtgagctctgacagcccggtcacatgcagggcccacgctggcagagctggaggagcgtgtgtcaggggctccccaagaccaccctcaggctcagtaatccactagaaggactcacagactcagaagcgggacttgcagttgcaggggcttacggtgaaaggatacagagtagaatcgggaaaaagaaaagtcacaggcaaggaggttgggaggaatccaggcgcaggctcccggtgtcccctcccagtggggtcacggaaatgccctgaattctccctgcacccatgtgtggcaatgcatgtgaaatgctgccaagcaggggagcccaccagagcctgggcgtccagggttttcaatggggtcagctacataggtgtgacctcagactgtagaggaaaagcaggtgttccccatccatcactgttggtatgaactacccagaccaactggtactggtgactcaaggcctcaggcaggcaaaaacactcttaataggtggagccttccatgagcttggttcccaggagctgcacaagggccagtcttgaaaacaggcgttggccgggcacagtggcttacgccagtgatcccagcactttgggaggcccaggcgggtggatcgcctgaactcaggtgttagagaccagcctgggcggcatggcaaaacaccgtctttacaaaaaaattaaaaaaaattagccagatgtggtggcgtgtgcctgtactccctgctcctcgggaggctaaggtgggaggattgcttgagcctgggaggtggaggttgcagtgtgctgatatcgtgccactgtactccagcctgggccacacagcgagatcctgtctcgaaaccaacaacaaaagaaacaaaacaaaacaaaacaaaaacacagacctttgttgggaatgtgcaggctttgagcaatccaggtctgctgagtcagccttttcctgtgcacctggtgaggcctggagaattttccttgggcaaggctgggcgtgactgctccttctggcacctccctggtcagtgtggtggagcagtggtggtgctgggggctggaggagccagtgagggcactagtggtggaccctcatgcccaggattgtggggagcctactggcgcctcctaggctgggtcagagctttcccagtgccccacctcaacccctgcccagggcacagcaggttctcctgggccttggacctcctccagccagagaagtgaggctgtcactgagagtccagcagcgccaggcctatgccagtctgtatatgggcactgtctcacagcagctcagagagacaggcatgtgggtcccttctttagagccccaggagattggggctgcccccgagggtggggcaaggcaacctgaaaccccactctccccactgtcccacacctcctcctgagcgcatgggtcatgtgcctggggactgtgggctcctccagctctgccagtgcgggccctgtgtgggaggtgaaccctgcctggcgactctccccctgcagtgctcagtaacctgtggcaacggcacccaggagcggccagtgctctgccgcaccgcggacgacagcttcggcatctgccaggaggagcgtcctgagacagcgaggacctgcaggcttggcccctgtccccgtaagccacctgcagcccctgcccctgctcccagcatgcagcagcccagggcgggggtgtcagaggcttggttcaggcaaatctggctcttcccggagagtagctggactcaacatctgtgagcatggagaagcggggcactgcaggccaggtctgggacctttgcctggcaggaaatggagggagctgtgtggagctgactcgcccctccctgctttcagggcactgcagactcacggtgacagcaggactcggccagctagggaatgctggtggctatggtgtagggggtgcctgtgtgaatagggggacgcctgtgcgagtagagagtgtgctctgtgacctttgaggagaaccagaatacctaccacgcacagatgcctgtccaaacgctatacatgtgtcacctctaaggtctccacacagttcaagactggaccgtgcctgccacagttcccttctatagaggagggagctctggggggtctaggcacctgcccccagctggggagggtgtatccaggatctctcattcccctggcactctctgtccaagctttctgggagctcagagctcgagtcagcaggtggaacccggggcgcgggcagggtgcaggggcagaggagccggcccagaaaaggaggcggcagggcctgcatgccagggcagcgagagggacgggatagctgagacccagctgagaccccggctgctgtcaggaggggcaggaggtgggcgtggacttggcagcggaggaccctttgtccgcccggggaggcgagggccttgaatgacgcttccccaggaccccgggagacccggagcctctctgcctggggtgggggccccagcctggtgccctgcggccgcagcccctctctcctccctctaggaaacatctcagatccctccaagaagagctacgtagttcagtggctgtcccgcccggaccccgactcgcccatccggaagatctcgtcaagtaaccgacccgtttataactctgcctctgccctccagtgcatgccctgcgccctgtggagcttgccttgggcccccctcctctctgtctatggaaagctcccctgactctgcgggcgcgctctggggtgaccgttttctcccgggcctctgagctcggcgtccgctccgggccgcgctgcctgctggcgggggctcgggcctctgctggggccgaacctggttggtgatggcttgtaaaggggcaaagatctgtcgtggttgcaggaggggccggtggccaaagggcgaccctccgggccgagcccgtcccggcccgggggggttcgcggtctcgcggcgtcgtgcggggaccccaccccgagtttccggcactgccaggtgcttcccggctgccaccgccgtcgctgctgccgccgaccctttgctgagcgtgtccttctgactcgtggaactatggcccgcttccgcccggccttcgcgcagctcacagccccgcgcggccctgtcctgcgggggtccggtcgcggaggcggcggaggggcgcggggacactccccacctccactgtccgcccgtcggccccggtggccttttctcgcctcgcgcacagctcccccgccgcagggctgagagagagagtggccgtctggtgcgcgcgtgcctcgcccacgcgtgtgaaccactacagaattacctcaatttttattgcttttttgcttagaaaaactatgtagaagatgccttaaagttgaaaggtaacgggattggctgccaactccagcttcagagggggaacgtgggccagtagaaggcagggaaggtgtaggggagccggtgcgttcatccaccttttgccaaggttgaggtttccaagtgcagacggcttctctccttgggctgagcggtgcgcaccgtccgtctccgcggactggagtctgccctgatgccccactggccagtcggcgctgactgttgcatggagcccccgagggtgctccacagcgcggccttacacccagggggcgaccccctgggccctgagccgcgatccatgtagcactcctccccgcccctccaccccagccaccgcctctgttcacaccgcacccctgccgggcggccggcccctactcccgcggctctgaccgccgttctgtaaataactggtgtgcacctgcgtactaatctcacgactgttaacttccaactttgacgaggccatgcgagcgacacgcgcgactggggaaggtgcaatactgtcctgggcatatgcactttggtttatcagggatattttattagtgttttgtatgtatttaatgacgtattctataggttccattgtcgttgcttttctggttttttttatgagacgttagcgtgtgccaaagtgactgtgaaaatgacctttcattcttactaatgatggaaagacctcctgtcatgcatcccacaaataaactcaataaaagttccatgaaactgggtgcgtgggtttggcaagctgatggctccttctctttttgggggcccagacactgaggagttgcggggcctcactcagtagcattaactaccccggtttctaatttgaatgactttactgccccactccccactgcccaacatagatatttagggcccctccccctgaaaggtgtatctcccctccccaggtattttccaaaatctgatagcaaaccgtgcagacaccccaccgtgactccgggttttgaatcatgtcatatgagcacctcgcaagaatatctaggttctatatggaggtctcctcgtcaggaaaagggcccgagatgggtttctcctcatctttggagcagagcctgtggagtgggaatgtggggtcagtagcccagacattgctagtccaggtcacctgccgtgagccaccagcaggtcactaccctggctccaggcacagttctcggccttgggctactcgtccaggaagggagaggtgcccatccggctcaggtggggggctgggccagccccgggaaagcctgggtcgggagaggggcagggcagtggtggctctctgggcaactggcctgcccatgtcttccaaggtcttcccaggcagccacagggcctgtgttctctcacattgctgaaaatggccagaaagagggtctgggttcaagagggacctcctgacctggggcctgggctgtgtcctgcccatggaagtctcactcctcccttttctgtaccactgaggagtcccaccagggagagggaagaaagcgtggaaggccatgagaaagaacagtggggagcagcccagtgtcatggggacaggccttgggcatagggccgggcccgggggctagcctggggagggagcaaccatggtagcgatggctgagttcagcctgcccagagctcagatcattgatcatcaaaagcaatcgcagcttaaaggagacaagaagcatcagggaaaattgggtcagacagtgcttccctccactcagtctctcttcccagagatgggtcaggagcaattcccgctaagaggctcctaggccagagctagagacgccgcctacagcccaggtgccaaggagggcacatctggaggggggtgcctcttgcttttttaaccagctgcatgaccttttgaatgttggcatgggtgtctgagcctaccactcctttactgagaaatgagaatgaggtattctccatccagcattttccaaagcatgggaaatggaaggtgattcggtggtgcataaacatagctggggctgcactgcactgagcggtcccttcctagttccctttatgctttatggtgacctcaggaagaaagcctcacttgctaccagctttagcctgtctcacatttgctcatttcccttcagctcagagcttggcaggcaggagtctctctctagaatttgatgagttaaagtgtgactttgaaattgactttaaaaggactttaaactttttttttgtattcctattttagggttacctttgttcactgcagtagctttccatgagtggtaatagtataaggtcttctaaaacaaattttaagtgtaaaaaggagttaatttaaaggatatgactaagcaaataataatgcaggtgctgttcaggtgtagccaagatcgtgggagtagcctacagtgacttaagtttatgaaaactgtgtttactctcaatggttgattgtcattcactggaagacaataggtctcactacttgattgctactggaaatggccgaagaccaaatattgtaaaaccacagtgttcatcttggcggagaggcatcgccagtcattacctcaggtgcatcactcttctctgtggtccgtgatgatacttaaaaatgtacaaacctggggcatctttaagatcagttggtcatgatgactttgaaatttttctaggctattttgaaattttcctaggctatttgcatagtcaatctcttggccaggattttatttcaattttgtatttactcattgacgtatttttatttttttaaactaagagcaatgccgcccactgtggggagaaaatcagacatagaagtccagtatgtagaccaggtggaagggggaccccacctggggctgccacccctcactcaatgggcatttatggagcactttctcgtgcatggctctgacctaggcgtgcacttgacccacgatcagtcaaccttttctgtaaagggccaggtagtcaatattttgggcattggagcccacatggtctctgtcacaggactcagctctgcctttatagtgggaaagcagccacagataagaaatgcatgggccgggcacagtggcttacacctgtaatcccagcactttgggaggctgaggtggatggatcacaaggtcaggagttcaagaccagcctgaccaacatagcgaaaccccgtctctactaaaaatacaaaaattagccgggcatggtggcacgcacctgtagtcccagctactcgggaggctcttgaacccaggaggcggaggttgcagtgagccaagatcacgccactgcactccagcctgggcgacagagcaagacttcatctcaaaaaaaaaaaaaaaaatgcatgggcatgggcctgatccaataaaactttatttacaaaaccaggtggagggagggacttggcacactagccgtagatggcccaccactgtaccaggctgatgtgattcctgcttttcagggatcccagcctggtgggggagacagtgagggagtggagatgtggataaatgtgtaacaccagccttatctgtgtgaaggaaaaactatgggcaacaggagagggggcagtgtgcagccagggtgtccctcccagcaccatcaggcccaggctccctcctttgtcaaagcctatggggtagggagaagggaggccaccatcagctcttatccagaaccccctgtgtttccctgagggtagggctcagtggtttcacaaaccaggctgctggagaggatggggtggggcagggatgggagctctgtgtctcctccacccaccttcaaacagtactatcatcagcagtctgagtctatctgtttcatatattgggcacctgtgtaagatttttatctgagaaaagccttctgccagtttcaaaatcctgacagccacatctcaggatcttccgatttgatttctggcatctcccctgggtaccaggccctcccccttcctccttggcactgtgagcatggttcttgggctcagtgtcagggagatccccacttctcctgatggccgatgggttttaactcccttttcatggtggaccctgcagccagtcatgtgttctccttattttggccacgtagaagctcagggccgaagtcgggcaccctctgatgcatgggcctccctgcattcttcttgcctggaaattgccattttcagattcaaaatttccctgttttgaacttcctcagttattcacattgatctttttcataccttatcttttttatgcctttatgcattatttggttcactgttctaggctctggggctctgccctgtggagctttcaggataatgaaaaagtctggcactagtcattcatctgacaattagatgcgagcttggctgggaaggcacagctgctgagaccgtgtgctgcagagaccttacctgctcaaggaggtcaggcgatgcctgcctgaggaagatgtgctccaactgcccctgaaggaggaagggtggtagctggaggcaggagagaggcattgcatgtgcaaaggccctgtggccaaaaggagttccatgcagagcaaggagtctaaggccagagggaggttggaaaggggaaagggacaggtcagggacttcaagtggcggggggtggggggggggtgccgtggtcacatcttcagtgagaaaacagcattctgactgaagcaggatagctggatgacatgggtgaagaatggacacagacccctcccatagtgcagccaagaggcagctcagccagggtggaggtgggagacggggaggaacaagggcatatctgagagtgtctaggacggggcacccaggtgtttggcttgtgtgcctgaaacaccatgcaccgagacagggtgggcagcagaggccctaagctcacgctgcaggggttgggtctcgggcttttgggacccacaggcccttggtggatttggcttgtagcaagtctgaagcttcaggggtttggagctggtggtctgtcaccagcttctaagggaaaattacaggctggagcagtggccattaagaagcaggacatcagaaccactggccctcgatggaaggaagggggtcttgtctgttttggacagcttcaggtgtagattgtgtcatatgttggtgtatgggataactgtcagatgtggctcccatccaatgcctgagcctttctccctccctttctccctccctttcctcctccctttcttccttttgtccctccctccctttccttttttcctttctttccttccttcagttcctccttcctttcaccctctccctccttccttcctttcaatagtagatgagttcaactaaggagagtgagggaaaaggagggcacgtcgggggtttgtgtgggaaaggtctgaagtcatcactgtggagagtagagagcagctgagcagagaccacaacaggcggtgttgggctcacggaggtcagtgattcggaatttatactggatcaagtatctcctgtaacatgacttattctttcttcttgagtgaattttttaaaatcatcttaatttttgtgttgtggaatgaggggatggggagagggaaggggtgaaaacttgggaaggagacagagagtaaagagagtgtgagcgcaagaagagttgatgggttgaatgaacatagccgcagacagaggtcgagatgggccagggagaagatggctgggtggaaagtgagagataatggtggcttctgtggagagtcggggctctccatgtaagctggaccacagatgaccagtttcttgggtggaaaggaaagagaaagatgtgcagggtggaacgattaatctatgtgagggcagcacgtttctttgggaaatggctggatgcgcaaggtggcggtgctatagggggatggagcagaggctggaaatgaggttgttgggtaagttgaggcaagtataagaaagcccatgcaggtttgggtgatgtttaactttcctttaggtgctgttcagttaaaagatcgtccggggcatctgggtcagaatgggagcaacatcagggagttgtggagcatggtggggccacagcggccctgggatttgctatattgggtcttaggaattggctcttttaggtttaattttgttatagttactacttagagattattgtagagtcaagccttgccacagaatttcactggggttaccactgggatgtcaaatgtgaagatgtgataaagtcctattctttaagatgagtttggaatcactctgtaagaacaaacgggcctcatttctttctcaaactttaagagatactgaaacatccaggttcaactggggcctgcttggaagagggaagccttgctcacagcttgtgtgtcagcacttccaggcaggggtccctggacactgcctgcactggggatgctttgacactgaacccacacagactttctgcctgggctcacttgcctctgtgctgtctctgggctcttccatatgcctcctccagcaagctgcaccctgtgggggaacaaagtcccccttatcttgtcctttggttatttgtcccacttttctttttcagagggccactgccaaggcgacaagtcaatattctgtaggatggaagtcttgtcccgctattgctccatcccaggctacaacaagctgtgctgcaagtcctgtaacctgtacaacaacctcaccaacgtggagggcaggatagagccaccgcctgggaagcacaacgacattgacgtgttcatgcctaccctcccagtgcccactgtagccatggaggtgcggccatcaccaagcacccccctggaggtccctctcaatgcctccagcaccaatgccacagaggatcacccagaaaccaatgccgtagatgaaccctacaaaatccatggcctggaagatgaagtccagccacccaacctaatccctcgacgaccgagcccctatgaaaagaccagaaaccaaagaatccaagagctcattgatgagatgcggaagaaagagatgctcggaaagttctaataaaatggaaagatagcatccctagcatttttttcttgcttatagagatattccatgggatagcaaatcctgtgtcatggagatgaagtcaaaattcctgattccaaaaggttttgagaaaacaaagagggggaatgacgtaagaaagataggcatgagcatgtggtaactaggttagcacgtgtgcttcccagcccaggagcgaccaaatactgtggtggcgtcaggtgtgcagtggagaggaatatagaggctgtatggcctccctcagtgagggcagggcaagagggatcactctgagagaacaaaaataggccccaagttgctaagcagtgattgggaaccttcctttccttggcggagatgcatgacattccctaccgatccccagacacagcctgtgggactcttaggagaaatggtgatttactgaataactgacccgttgccgagatgagtacaatgaagtggaggtgatgaactcaaatcgtcttccagggccaggcggctgaccggggtgagcgtagtggcccgctggggaccatggccgccctgacagccacacccacctggagctgacttggttctggctgttgctgccactgtgaaatctgtatctctctccatctctgctctactatccccggccttgccagacagtgttctttttcggaagaagtctagatttttgcatgaaaaaaactcaatctttaaaggtcgactcagaacattttaaggaggcctccacttggtctgatgcagtcttgctaattaagaactaaaggccttctgaccttcttggtgctcatgctgtacggcatctgaatgtctcgaccgagtctgagccgtgcagctgtcctccacctgcgaaagtaatgagaatcctatcacgggacataaggataggtctaaacagggtccatgccaagaaaacagtggggtgctctcccaggcctctcccctgtccactaaccctggccttgccggctgccttccaggctctgggggaagagctcctgcattcttccctggccaccttggctccagggctccccagagagcctcttccctccccaagtacctgagaaagatgagagaggcacgtgctctgctgggaaggtccagtgagcggttcaagggcctggaatctccctacggccaagtctaagggttctgggattctgggctttgtgggctttgcttgcttgctgggaatgggctttccctgtcccgccctgccccacctcgcctctgtctctcagaagctccagaacccagcagtgacctgcaaaatgtggcctctgatgggggcttagggtgggagatggggagagcctacattgtcttttgctccttgaaaactttaatagctcctattttccagagaatggtgctttgtgagcaacatgcgagtaagagagaaataggaggaagggggagtaggggcggatgggagaagagtggctcatttttacctctcactgccttgacattttgtgaacgtgaagcttaaactttctgggcttacaagacccaggggcacgtcagctccttagatgggctcagcctgacacataattcttaaacctttcctgtttaagaaacttctagaggctgtgtactctcaccaatcctcttcgagaatttgttcatgtgtatttccccattatatggatgaggctcaggataacagcatagtggctaccttctactgagttttgaggtgctaataagtatgtttgtctgaggctgcacatgtgggtggctctgtgtgtatgatccaagggacaaaatgacgatgtaggaaccagcaagaacggaatctgggctgatgcttcagtctccacctgggtgatggctagcctcccgccctccaccaccgcatcccacacgtgctgcgcactgtccccgtgtctcctggagaaccaaactggagaaaacctttctgagtatctctcatagtaccccttccttaagaagatgtggtttagagcatgtgtgcaatcctgcctctgtaattaggaaacggagcccgaggctttccattgttggttgaacccaggacagctggtgctattcacaggctgaagaactgggcagttcttacttgggtctgtcctaggatgtggaggaagttcaggactaacgctaggcagagagtatgactcggtttacccagcctaggggcctctggatgggaacactccattccaagatctcagcagagcagggcttcctggcttgaggctggaagcctttgggaagaggcccagctgggacattccctgggcacctgtcttccgctgaagggagcaaggtgccctctgggactgacagccatgaccctctgtgccatcctcaatccttgagccatatatcaagagtcctctagagccggatggtcctcaaaagtctgtccaaggaatgccaacgttcaccgggctctgagaaacgacgcaaatctctgagctggggaccacttggagaaccggcttagtaacagtcctgatcttcgcaagccagcttcttctgcatctgaggggctcctggcgcccagaggaggcagacagatgtcttctagctgagtttctaaccgcatgatgagactcagaccttccgctgcactagaaaatctgcaacagtgtccctgagtcacttctccttagtgggcagactcgtgttagatttgtggaacccagctctctgatttactccttttggaaaacccatggaatttcatgtataaggctttcatttgtattttaaggtttttctgtttgttttgagtatatacatggtgctcaatagcaacatcttagcagatgaagcagtttatgattccactccctcctgtatgacaggtagccactatactgaatcaaggtgctgaactcaaatcacaaaattctggcttaccgatacaacaaccaatacatctttgttctgtaatgtaaaatttgactccttacttttataacttattaaagttaaaatgtctgtgtttttgcaaatcatgcctgcgtttgttgttgtcttcattacacttgtgcccgtgcctggctggaacgtgggcagaatggaaggaggtgctgccttcacaaggccgagaggtcagggcgccggggagcattgagccagggctgctcaagggagaaccatgcaaagggcagaaggcaccccgaagaaaggctccctctcctagctccccacgggtcggctctccaagtcacatgactgagccaagggccccaaccaaacctttagttcagggaagagatgaagagtctccagacatctcctccctgatgacaatcccttctctcctatgattagggcttccagaaaaaatactagatgcacagtgaaatttgaatttcagagaaacaacacacatgcttttttttagcatgaaaatgagacatatttatactaagaaattattttttgtttctctgaaatgcaaatttaactgagaatcctgtgttatttgttaaatttggtcacccaacttgtacttcgtgttccacttcttttttttttttttcttttgagacggagtctcgctctgtcacccaggctggagagcagcggcgcgatctctgctcactgcaagctccacctcctgggttcacaccattctcctgcctcagcctcccgagtagctgggactacaggcgcccaccaccatgtccagctaatttttgtatttttggtagagatagggtttcatcgtgttagccaggatggtctcaatctcctgacctcgtgatccgcccgcctcggcctcccaaagtgctgggattacaggcatgagccaccgcgcctggccttcgtgttccacttctaaagaaaacccttatctctggcccttgttgctatcagcaggtatagggagaagcaggggtaggaaggcagaggagatttcttctgtcccaatttttgtaagtattcccatgccttctaaaagaacatggaattggtggttgttggggatagtatctatacatgcccatgatgtcaaatttgttaatttgttattgaaatattttgtatcttgattttgttgtctccttgttctatcagtttgatagaaagttagggggtttttgggttttttttttttgttattgttgttgtttgtttttctggagggagtttcgctcttgttgcccaggctggagtacaatggcacaatcttggctcactgcaaccctccacctcccaggttcaagcaattctcctgcctcagcctcatgagtagcttggattataggcacccatcatcacgctcagctaatttttgtattttcagtagagacaggtttttgccatgttggccaggctggtcttgaactcccgacctcaggtgatgcgaccgccttggcctcccaaaggactgggattacaggcatgagccactgcgcccagccagaaagttgtttcagtagctcccactgatcatggattttactatttctcccatttcaattgcagttttgtccattttacccgtcgttaatttttatttatttatttatttgtttgtttatttatttatttatttttgagaccgagtcttgctctgttgcccaggctagagtgcctggcacattctcagctcactgcaccctctgcctcctgggtcaagggattctcctgcctcagcctcccgagtagctgggattacaggcacccgccatcatgcccagctaatttttgtatttttagtagagacagggtttcgccatgttggccaggcaggtcttgaactcctgacctcaggtgatccacctgccttggcctcccaaagtgctgacattacaggcgtgagccactgcatctggcccctttttacccttcttttaaagaaggagcttttcactattttgaaaccacattgagaacacacacatttctaattgttatcttcttggtgacatcatccttttatcttaatgaattgactgattttattcccagaaataacttgtcttgcaaatttcccccaatgttagtccagtatagctacatcagcttgctttcagttaaaggttgcatgatataacttctcctttactttcaaattttctgtatcgtatgtgctgtatttgagctttgtagactatcagttttaatatagcttaacattttaattctttaattggactatttagttcattatatctaatgccatccctgcggccagcaccctctggctgccttctgtgctctccgttcctcctgactgttctgtgttctttctccgcttctttctccccttcctttggattggctgcttttttccccattccattttaaccttctgttagttttgaagccacgtactgtttttatttcattgtggatgaataaagaataatttatagaaaaatgaaataaagaagtaaacatatataaaatgcatacccaatttttaaaaatagttttgaggtataattgacatctaataaactgcacatatttgggtgtatacattgacaaattttgaaacatgtatacaagtgggaaaccatcatcacaatcaagacagggaaccggccaggcatggtgactcaacgcctgtaatcccaccactttgggaggccgaggcaggtggatcacttgaggccaggagttcgagaccagcttggccaacatggtgaaacctcatgtctactaaaaatacaaaaattagccgggtgtggtggcacgtgcctgtaatcccagctactcaggaggctgaggcagggagaactgcttgaacccgggagatggaacttgcagtgagctgagatcgcaccactgcactccagcctggacgacagagcaagactctgtctcaaaaaaaagaaagagaacctatccatcgcccccaaaattgccttctgctcctttgtaatcttgccttcactcctgtccccaggcagctaccggtgtctcatttgagtttcataaaatgaaattaaacactatctactctctgctttcagtcagcataattttttagattcatatgtgttattgagtacatcaatagttcatccccttttatgactgagtagtagtccattgtacagatatatttactttgtttatttaccagttgatggacatgtcttttcatgcccttatttgtcatgtatatgtgtatatatggtgaggcatctgtgaaaccttgccgaatttgtattaggttttttattttcttatgtagtttggagagtatattatgagtaatttaccaaaaatatgctttgcaaatattttctcccagttcgtggcttgtattcttattctctttttattctcttaacagtgtcttctgaagagcagaagtttttaattttactagagttcagtttatcaatttgttctattatggactgtgtgtttcctattgtatctaagaaatcttcactcaacctaaggtcacaaagattttcttctatgttttgttctcgaagttttatattcctaggttttacatttctgtctatattttgagttaatttttgtataaaaagtgaagtttggatacacgttgatctttttgcatcttgatatccaaacatggcagcgccgtgtgttgaaatttccccacgaaattgctgaaggccgtgaagatttcctttttttttttctaaaagtataacagtattagctcttatgtttaggccaatggtccatcttgatttaatttttatgtatggtgtgacatgaaggtctaaattcatctttttgcatgtagatatcctgttgtcattttgttgcataattttttaaggcattttttttattatactttaagttttagggtacatgtgcacaatgtgcaggttagttacatatgtatacacgtgccatgctggtgcgctgcacccacttactcgtcatctcacattaggtatatctcccaatgccatccctcccccctccccccaccccacaacagtccccagagtgtgatgttccccttcctgtgcccatgtgttctcattgttcaattcccacctatgagtgagaatatgcggtgtttggttttttgttcttgcgatagtttactgagaatgatgatttccaatttcatccatgtccctacaaaggacatgaactcatcattttttatggctgcatagtattccatggtgtatatgtgccacattttcttaatccagtctattgttggacatttgggttggttccaagtttttgctattgtgaataatgctgcaataaacatacgtgtgcatgtgtctttatagcagcatgatttatagtcctttgggtatatacccagtaatgggatggctgggtcaaatggtatttctagttctagatccctgaggaatcgccacactgacttccacaatggttgaactagtttacagtcccaccaacagtgtaaaagtgttcctgtttctccacatcctctccagcacctgtcgtttcctgactttttaatgattgccattctaactggtgtgagatggtatctcattgtggttttgatttgcatttctctgatggccagtgatggtgagcattttttcatgtgttttttggctgcataaatgtcttcttttgagaagtgtctgttcatgtccttcgcccactttttgatggggttgtttttttcttgtaaatttgtttgagttcattgtagattctggatattagccctttgtcagatgagtaggttgcgaaaattttctcccattttgtaggttgcctgttcactctgatggtagtttgttttgctgtgcagaagctctttagtttaattagatcccacttgtcaattttggcttttgttgccattgcttttggtgttttagacatgaagtccttgcccatgcctatgtcctgaatggtaatgcctaggttttcttctagggtttttatggttttaggtctaatgtttaagtctttaatccatcttgaattgatttttatataaggtgtaaggaagggatccagtttcagctttctacatatggctagccagttttcccagcaccatttattaaatagggaatcctttccccattgctttcctcaagtttgtcaaagatcaaatagttgtagatatgcggcgttaattctgagggctctgttctgttccattgatctatatctctgttttggtaccagtaccatgctgttttggttactgtagccttgtagtatagtttgaagtcaggtagtgtgatgcctccagctttgttcttttggcttaggattgacttggcgatgcgggctcttttttggttccatatgaactttaaagtagtttttttcaattctgtgaagaaagtcattggtagcttgatgcggatggcactgaatctgtaaattagcttgggcagtatggccattttcacgatattgatttttcctacccatgagcatggaatgttcttccatttgtttgtatcctcttttatttccttgagcagtggtttgtagttctccttgaagaggtccttcacatcccttgtaagttggattcctaggtattttattctctttgaagcaattgtgaatgggagttcactcatgatttggctctctgtttgtctgttattggtgtataagaatggttgtgatttttgtacactgattttgtatcctgagactttgctgaagttgcttatcagcttaaggagattttgggctgaaacagtggggttttctagatatacaatcatgtcgtctgcaaacagggacaatttgacttcctcttttcctaattgaataccctttatttccttctcctgcctaattgccctggccagaacttccaacactatgttgaagaggagtggtgagagaggacatccctgtcttgtgccagttttcaaagggaatgcttccagtttttgcccattcagtatgatattggctgtgggtttgtcatagatagctcttattattttgaaatacgtcccatcaatacctaatttattgagagtttttagcatgaagggttgctgaattttgtcaaaggccttttctgcatctattgagataatcatgtggtttttgtctttggttctgtttatatgctggattacatttattgatttgtgtatattgaaccagccttgcatcccagggatgaagcccacttgatcatggtggataagctttttgatgtgctgctggattcggtttgccagtattttattgaggatttttgcatcaatgttcatcaaggatattggtctaaaattctcttttttggttatgtctctgcccggctttggtatcaggatgatgctggcctcataaaatgagttagggaggattccctctttttctattgattggaatagtttaagaaggaatggtaccagttcctccttgtacctctggtagaatttggctgtgaatccatctggtcctggactctttttggttggtaagctattgattattgccacaatttcagagcctgttattggtctattcagagattcaacttcttcctggtttagtcttgggagggtgtatgtgtcaaggaatttatccatttcttctagattttctagtttatttgcatagaagtgtttgtagtattctctgatggtagtttgtatttctgtgggatcggtggtgatatcccctttatcattttttattgcgtctatttgattcttctctctttttttctttattagtcttgctagcggtctatcaattttgttgatcctttcaaaaaaccagctcctggatttattaattttttgaagggttttttgtgtctctatttccttcagttctgctctgattttagttatttcttgccttctgctagcttttgaatgtgtttgctcttgcttttctagttcttttaattgtgatgttagggtgtcaattttggatctttcctgctttctcttgtgggcatttagtgctataaatttccctctacacactgctttgaatgcgtcccagagattctggtatgttgtgtctttgttcttgttggtttcaaagaacatctttatttctgccttcatttctttatgtacccagtagtcattcaggagcaggttgttcagtttccatgtagttgagcggttttgagtgagattcttaatcctgagttctagtttgatggcactgtggtctgagagatagtttgtcataatttctgttcttttacatttgctgaggagagctttacttccaagtatgtggtcaattttggaataggtgtggtgtggtgctgaaaaaaatgtatattctgttgatttggggtggagagttctgtagatgtctattaggtcttggtgcagagctgaattcaattcctgggtatccttgttgactttctgtctcgttgatctgtctaatgttgacagtggggtgttaaagtctcccattattaatgtgtgggagtctaagtctctttgtaggtcactcaggacttgttttatgaatctgggtgctcctgtattaggtgcatatatatttaggagagttagctcttcttgttgaattgatccctttaccattatgtaatggccttctttgtctcttttgatctttgttggtttaaagtctgttttatcagagactaggattgcaatccctgcctttttttgttttccatttgcttggtagatcttcctccatccttttattttaagcctatgtgtgtctctgcacgtgagatgggtttcctgaatacagcacactgatgggtcttgactctttatccaatttgccagtctgtgtcttttaattggagcatttagtccatttacatttaaagttaatattgttatgtgtgaatttgatcctgtcattatgatgttagctggttattttgctcgttagttgatgcagtttctccttagtctcgatggtctttacattttggcatgatttttcagcggctggtaccggttgttcctttccatgtttagcgcttccttcaggagctcttttagggcaggtctggtggtgacaaaatctctcagcatttgcttgtctgtaaagtattttatttctccttcacttatgaagctcagtttggctggatatgaaattctgggttgaaaattcttttctttaagaatgttgaatattgaccccccactctcttctggcttgtagagtttctgctgagagatccgctgttagtctgatgggcttccctttgagggtaacccgacctttctctctggctgccctgaacattttttccttcatttcaactttggtgaatctgacaattatgtgtcttggagttgctcttctcgaggagtatctttgtggcgttctctgtatttcctgaatctgaatgttggcctgccttactagattggggaagttgtcctggataatatcctgcagagtgttttccaacttggttccattctccccttcactttcaggtacaccaatcagacgtagatttggtcttttcacatagtcccatatttcttggaggctttgctcgtttctttttattcttttttctctaaacttcccttctcgcttcatttcattcatttcatcttccatcgctgataccctttcttccagttgatcgcatcggctcctgaggcttctgcattcttcacatagttctcgagccttggttttcagctccatcagctcctttaagcacttctctgtattggttattctagttatacattcttctaaatttttttcaaagttttcaacttctttgcctttggtttgaatgtcctcctatagctcggagtaatttgatcgtctgaagccttcttctctcagctcgtcaaagtcattctccgtccagctttgttccgttgctggtgaggaactgcattcctttggaggaggagaggcgctctgctttttagagtttccagtttttctgttctgttttttccccatctttgtggttttatttacttttggtctttgatgatggtgttgtacagatgggtttttggtgtggatgtcctttctgtttgttagttttccttctaacagacaggaccctcagctgcaggtctgttggagtacccggccgtgtgaggtgttagtctgcccctgctggggggtgcctcccagttaggctgctcgggggtcaggggtcagggacccactggaggaggcagtctgcccattctcagatctccagctgtgtgctgggagaaccactgctctcttcaaagctgtcagacagggacatttaagtctgcagaggttactgctgtctttttgtttgtctgtgccctgcccccagaggtggagcctacagaggcaggcaggcctccttgagctgtggtgggctccacccagttcgagcttccgggctgctttgtttacttaagcaagcctgggcaatggcgggcgcccctcccccagcctcgctgccgcttgcagtttgatctcagactgctgtgctagcaatcagtgagactccgtgggcgtaggaccctccgagccaggtgcgggatataatcttctggtgcgccattttttcagcccgtcggaaaagcgcagtattcgggtgggagtgacccgattttccaggtgccgtctgtcacccctttctttgactaggaaagggaactccctgaccccttgcgcttcccgagtcaggcaatgcctcgccctgctttgactggcgcacggtgcgcgcacccactgacctgcgcccactgtctggcactccctagtgagatgaacccgtacctcagatggaaatgcagaaatcacccttcttctgcgtcacccacgctgggagctgtagaccggagctgttcctattcggccatcttggctcctccgcataatttcttgaaaacaaacatcatttgttgaaaaggctgtcttttccctacaaaatttccttggtatgttgataaaaatcaagtgatcacaaatgaagaattttttttatcaattctgctccattgacctacatctttccttgcattagtgtcacaactgtcttgattactataacttttagtaagctttgaaatcagggagtatgaagtcctttaacttcgttatttttcaaaattgttttgcctcttcggagtcttttgcacttccatgtaagtatttaagtcatcttgtcaattctgcaagaaggcctactggcatgtgaaaaagtcacattgaatttattagatcagtcagggaacaactgatacctaacaatattgtgtctttcagtctatgaacatgaaatgtctttcgatttatttagattttctttaatatctctcaggcagtgttttgtagttttcaacgtacatgtcttacacatttttgttaagtttattcctaagcattttattctctttgatggactagttttattaatttcattttcatgttgttcattgctagtatagtgaagtacagttgctttttgtgtcttaatcctgggtcctcaaatgttctcaacatgtttattagttctagtagctgggttttttttttctatggattcctcagtattttcttttcttttctttttgagacagggtctcactctgttgcctaggctgaaatgcagtggcataatcacagctcactgcagcctcgacctcctggacacaagcaatcctccctccccagcctccaaagtagctgggactacaggtgcatgccaccatgcctggctattttggttttgttttgtttttgtagacacagggttttgctatgttgcccaggttggtctcaaactcctggactcaagcgatccttctacctggtcctcccaaagtgctggttccactggcgtgaaccactgtgcccgtcctggtattttcttcatatttgtgaataaatacagttttatttatcttttttcagtctggactgccttcttttttattattggactggctagaacttccctacaatgctgactagaaatggcaagagcaaacatgcttgccttattcctcatcgtataggaaaagcatgcagtatttcaccattaagtatgatgttagctgtaagcttcttagagatgcactttattagactgaggaaggtgccttctattcctaatttattgagagttttttttttatcatgaatgggtattggattttattgaatatcttttttgtatctaatgagataatcacataaattttgtcctttctcctattaatattgtctattatattaattgattttcaaatgttaaatcaaccttgcattccacagatacatcccacttggtcatggtatataattctttttctctgttcctgaagttgtttcgctaatcttttgttaagggcatttgtacctctattctgtagttttctcatgatgtctttggctttggtttcagggtaatactggcctcatagaataaattgggaagtggttcttcctattccttctactggaagagtttgtgaagaattgatattacctctgtcttaaatgtttgatagaccaccagtgaacacctctggcccaggcttttctttgtggccagattttatattatgaattcagttttttgtgggtttttttttgcttattataagtctattaagattttatatttcttcttcttgaatcacttttggtagtttgtgtctttctagaaatttctgtttcatttgagttatctgatttgttgccatacaattattcctggtattcccttataatcctttcaactgttgtagggtcagtaatgacatccccatattcactcgttatttatgcatttgtgtttttttaccttttttcttttttttttttttttgagatggagtctcgctctgtcgcccaggccggactgcggactgcagtggcgcaatctcggctcactgcaagctctgcttcccgggttcacgccattctcctgcctcagcctcccgagtagctgggactacaggcgcctgccaccgcgcccggctaattttttgtatttttagtagagacggggtttcaccttgttagccaggatggtctcgatctcctgacctcgtgatccacccgcctcggcctcccaaagtgctgggattacaggcgtgagccaccgcgcccggcctttaccttttttcttacgttagctaaaggtttttcaatcttgctggtcttttcaaagaagcaactttttgtttcactgatttttctctcctgtttttctattttctactgcactgattttcatttgaatccttaatatattcttcttcttgctttgggttagtttgctcttctactcgtggattaaaaattgtttttaattttcaaaatacttgggtatgtcccaattttatttatttatttatttttttgacagagtctcactctgttgcccaggttggagtgcagtggtgcaatctcgactcattgcaacgtctgcctcccaagttcaagcgattctcctgccttagcctcccaagtagctgggattgcaggtgtgtgccaccacacccagctaatttttatatttttagagatggcgtttcaccatgttggccaggctggtctcgaatgcctgacctcaagtaagtcacctgcctcagcctcccaaagtgctgggattacaggcgtgagccactgtgcctgggcccgttttattcctgtgtttgatttactatcattgtggccagaaaaacatactttgtgttatttcaatccttttaaatgtattgagactttgtaaatggtctggtatgtggtttgtatgtgttgaaaataatgcgtagtctgctgttgttggctaaagtgctctgggggtgtcagttaggtcaagttggttcatatgattgtttaagttttctagtggctatggctcgcctctctgaattccaatcccctcctcacctttcagccattttttttttcttgctcagccgtttgcctttttagctgttttcagcaggatatttggcctaaattatcaaatcagaaatttctggaacctatatttcaacttttaatataaaattgtctatttctaacaattggaattagactaagtgccatttccaataatgtgtgacaaacccgtaacacaaagttttagtggtgaaagagaataggcatttaaattcctagcaaagttcccaaatgtggcagtttcttccttatttctaaagcaatttaaactacagtgtttctaatatatatcaccataattctgtatatacagggcttttgattttcaggcaaaaaaaaattactggatagacaagggtcatgaaataaatattataaagatatcaaagttcaattaacctggttaatatatcaaaagttgtcataacctcaaggagaaattgacaaagcctccatcctagggaaaaagtttaacatgtctctcagtaattgatagctcagcagaaaaaataataatatataatttgaataatacaacaaacaagcttgatctaaggaaaacacatatatctctgagcctccaacaattgaacaactcacattcttttcaaacacatacaaaatatttatgacaactgacaacatattggacaattaaagaataataataaattgaaatgattttttacttaatgtaacttaactacaaaattaaattagaaatcaatattttaaaatttagctaaaatatatttttgaaatttaaaaatcatacctctaaataaatcacaggtcaaaaaaacattgaaaattagaaaattctggtcaccaagatggcagaatagaaggtaacctgctcacatctccccacaacaacaagaattctgcgcctatccagaatcaaaagtctctctgcctcaggattcagataggagtttgtgaaatattggtggagcccaagatcttggaggattattttgagagtgcagactaacaccagttggctgatccaccaatcttgttcctgggttcaagcccagaaatggcccagtcccccaaggggctttggctaccgtactgtttgactttgaacctgcaaccaaaaccatctgttaaaggatccagaaggaattgtgtaccctagtgccttggtggaaaggcatctgcctcgtcacctccatcttagaagtaaacctcaaagttgccttgtggctcagctccagtccccatcactcccatgtaggtcctagctcagagttgctcacacaagaacccagagggagactcactcatacctcaatcccaggagtctgagcctccctgacaggcttgccaatcttatcccacaacagatcctgaggggaaccagtctcagctccagcccctcccactgcaatcagagaactatctcatctgttccaagatctgctgggagatgctcacctatctgggccaacataatgggctctccagcctttgtcccacagcagattccaaggggacccagtctcaactccagctcctcttgctgcagtaaggaacccattccacctatgcaaagacctgctaggagtcacacccatctgagcctacggtacagtcttctagactcagatctgcgaggaggcacacccatctgagcctacagtacagtcttctagacccaggtccctggctagcattcccacacagccccagtatatccattccttgggtcttccccaggtccatctgggactcaaaacctcaaagtcctcatgagactcacagcaagcctgggcatagagcatcttccagtgctgagatgggtacagtggtcacaggctcagggaactcaatagtgggcttagaatccctggaaggccctctgaagaaaggcaggcacaaatgaggccagactgtgaagactaaaataaatcttcagtccctaaatgcacagacattgttgcacatccacaagctcaaaaacattcaaggaaatatgacctaaccaaacagagaaaacaaggtgccagaggcagaccaaagtgacggagatgtttaatgtctcagatgaagaattccaggctgggcgcagtggctcacacctgtaaccccagtactttgggaggccgaggtgggcagatcacgaggtcaggagatcgagaccatcctagccaacatggtgaaaccccatctctactaaaaatacaaaaattggccgggtgtggtggtgcacgtctgtagtcccagctactcgggaggctgaggcagaagaatcacttgaacccaggaggcgggggctgcagtgagccgagatagccccactatactccatgcactccagcctgggtgacagaggtgagactcttgtctcaaaaaaaaaaaaaaaaaaaagaattccaaatagctgttctaaatagctcaacaaactttaggaaaacacataggattaattcagaaatgtaccagcaaatttaacagaaagattaaaacaaaaatttttttaaatgtgaaatcagccaggcacagtggctcatgcctgaaatcccagcactttgggaggccaaggctggtggatcacttgcggtcaggagttcaagaccaacgtggataacatggtgaaactctgtctctactaaatacatgaatattagccaggcatggtggcgcacacctataatcccagctactcaggcggcagaggcaggagaatcgcttcaactcaggaggtgcaggttgcaatgaaccaagatcatgccattggattccagcctgggcaacagagcaagactccatctcaaaaaagaaaaaaatagtgaaatcctggagttgaaaaatactatgaaaatttcaatagagaacatcaacagcagaactgatcaaacataggaaagaatcagtgagctcaaagacagactatttgaaaatacatggaagagagaaagaaaacataatgaaaaggaataaagaaagcttaggggatctataagacaacatcaaaccagcaaatattcagattattggacttaaagagggaactgaggaagaaatataggtagaaagcttatttaaagaaataataatagaaaactttccaaacttggagaaagatacaaatatccaggtacaggaagaccaaaggttagcaatcagattcaacccaaataagaattctccaagacatataaactctcaaaggtccaacatagagaggggattctaaaagtagctagagaaaagaagcaaataacatgtaagagagatcaaatattcctagcagaagacttcgcagtagaaactttacaggccaggatggagtaggaagatatatttccagtctgaagggggaaaaaaatctgccaagcaagaattctatacccagaaaagctatctttcagaaatgaaggagcaataaagactttcccagacaaacaaaagctggggcaattgattgctactagattggacctataaaaaaatgctaaagggattcttcaaaccaaaagaaaaggacattaacatgattgttatactaatgtaataatcatgatatgtaaactacttatatatttactaagaagactaaaagacaaaactatttaaaataactacaatttgttaagagataggcaatataaaatgcaaattgtgacatcaaaaattcaaaatgggggaagagagttaatgtgtacaggttttttctttgtttctttcctttttgtatgatcagagataagttggtatctatttaaaataacttgttatatctataagatgttttctgtaagccacacaggggaaaaactgaaatcctttccactaagatatggaataagacaaggatgcccactttcaccatttttattcaatatagtactggaaattatagccagaggaattaggcaagagaaagaaatacagggcatccaaattagaaaggaaggagtcaaattacccttgtttgcagatgacgtgattttatatttttaaaaacttgaagactccaccaaaaaactcttagaacttatgtaagaactcagtaaagttgcagggtacaaaattaacatacaaacatcagtagtgtttatatatgctacagcaatctgaaaaaaaaatcaagaaagcaatcccacttacaatggctacaaaaaataaaatacctaggaataaatttaaccaaacaagtgacagatctctacaagaaaaactataaaacactgatgaaagaaaccaaagaggacacgaaaaaatggaaagatatttcatgctcatagattggaagaattaacattgttaaaatgtctatactactcaaagcaaccacagatatagtccctatcaaaataccaagtacattctccacagaaacaaaaaaagcaattctaaaatttatatggaaccacaaaagaccctgaatagctaagacaatcctgagcaagaagaacaaagctggaggcatcacactagttgatttcaaattatactacaaagcaatagtaaacaaaacagcatggtactggcatggtactgacataaaaacagatacatagaccagtggaacagaatagagaacccagaaataaatccacacatctacagccaactgcttttcagttaagaagccaagaacacacattgtggaaaggacagtctctttaatagatggtgctgggaaaactggatatccacacatagaagaataaaactagatcctcatatttcaccatatataaaaatcaactcaaaatggattaaagatttaaacataagacctaaaactatgaaacaactaaaataaaacactgagaaagcattataggacattggtctgggcaaagattttttgggtaagacttcaacatcataggcaactggctgagcattgtggctcatgcctagaatcccagcactttgggaggccaaggtgggtggatctcttgaagtcaggagttcgagactggcctggccaacatggtgatatcctgtctctactaaaaatacaaaaattagccggatgttgtggtgggtgcctgtaatcccagctacttgggaggttgaggaaggagagttgcttaaacctgggagggagaggtggcagtgagccgagattgcaccactgcactccagcctgggcgacagagtgagactctgtctcaaaaaaaaaataaaaaataaaaaatacataggcaagcaaaacaaaaatggaattacatcaatctaaaaaacttctgcacagcaaaggaaataattaataaagtgaagagacctacagaatgggagaaaatatttgcaaactctccatcagacaaaggattaataacaagaataataaaaaatacaaacaactcaaaaaaagaaacaatctgacttaatgatggaaaaatgccatcacaaagaagatgagggacaaattaaattaaattaaattttaaaaatggacgaaagacctgaatagaaatttctcaaaagacatacaaatggccaacaggtatatgaaaaaatgttcaacatcactaatcatcagggaaatgcaaaccaaaagcacgtgagatatcatctcattccagttagaatgctatcaagaagacagaaaaaaaagttctagtgaagatgcagaaagaggggaatgctcgtatactgttggtaggaatgtaaagtagtacagccattatggaaaacggtatggaggttcctcaaaaaaactaaaaatggaactaccatatgctccagcaatcccactgctgatatgtatccaaaagaaaggaaatctctatagggaagagatatcagcatgcccatgtttattgcaacactattcataatagccaagatacggaatcaacctaatctaatggatgaacaggtaaagaaagtatggtacatatacacaatgggatattattcagccataaaaaacaaaattttatcatttccatcaatatgtatggaactggaggtcactatgttaagtaaaataagccaggcacagaaagacaagtatcacattctcactcatatgtgggaactaaaaaagtggatctcatggaagtatagattagaatggtggttaccagatgctgggaagggaagtgggtaggagaagatgaagagaagctggttaagggcataaaaatacagttaaatagatggaataaattctagtattcaaatggtacagcaggaaaattattgttaacagtaacgtgttgtacatttcaaaataggaagagaagaattgtgatatttccaacacaaagaaaaggtaagtgtttgaggtgatggatgtcctaatttccctgatttgatcattgcacattatatataggtatcaaaataccacatgtagccccaaaatatgtatagttattacataccaattaaaaattgtgaaataagaataaataagtgtattattaaagaaaaatgaaatcgaaaacaaaaagcatgcccgatttttcccaaacttttgttatatgcaggtataaaatgatatttcaacaaatataagcaaagcaagtaaaacataggaaaaattaaagacttacagatatatcacattgatcactgaaagtgtgttcacaggtaaattaacttagggaaatgttatttcataattctttatctgtttgtaattgtaatgaaataaaatttatgaaattatattcctcatattaaatgctatatgcacaacctgaacaaactaagcatatcactaaactttttaatgtgaccaaaacaaaacagaaaatactcctaaccgaatatcatagagcaaaacttgtgattcaatctgagaaagctgactgaaaaataaaatagtatgaaatttactcaggaaagtgcttggaagtacttataatcttgatacaaaaattagaaaaaaggtttgaaaattaattaatgagctatataatagaacaaaaccaaagaaattagaaggaaataaaaagccaagtttattaagcatggaatttaattataaaaaaaacttataaaggattaacaaagccaaaagttgacttagtatttacaaacttctggtaatgttgatgaagaataaaagacagatgcatacacaaaaactttggaaataaggaacagaactggccaggcgcggtggctcacgcctgtaatcccagcactttgggaggctgaggcgagcggatcacaaggtcaggagatcgagaccatcctggctaacacggtgaaactccgtctctactaaaaatacaaaaaattagccgggcgtagtggcgggcgcctgtagtcccagctacttgggaggctgaggcaggagaatggcgtgaacctgggaggcggagcttgcagtgagcagagatcgcaccactgcactccagcctgggcgacagagcgagactccgtctcaaaaaaaaaaaagaaagaaagaaagaaggaacagaatttaactattgaaagagtagaaatcagaaggttaatgaaaaaataatataaacaaattcatggagtagaagttagaaggttaatgaaaaaaataatataaacaagttcatgccaaaaaatggaaataagatgaaaaaattcttagaaaaataaaatttacacaagaagaactagaaaatctgatagaattatagtcataaaaagaagaatcaaatttgaaatttaaaatatttccacaaagaaaataccaggcttagaatgttagtagacaaatgctaccattcatgaagtagataattctgttatataaactcttctagttaatagtggggaaaagaagcacttctcaatttattccatgatgtcatgactctaatggcaaaattagataaggaccagaaggaaaacacaaaaaaaatggcatggatgcaaaattcctaaccccaatatcagtagactatatccatttgtggataaaaaggtgaagtgccacactaagttagattcccagaaatcaaggaaggtttaattttaaacctattggtttccatacaagatggtgaaatagcatgagtttctctctccccacattaactctggagaacctcccaaaatgaggtgggattattgatatgatgaatcaatataaatactatgagaatgcctgagaaagccgatttgaactggtgcaagttggcctgtggcaaaatattttggggtgtgtgtgtgtgtgtgtgtgttgtgtctttttgttttgttttttttacaaaactcaggtctggagcagccagacactgcaatgagaagatggcgttggagaagagtttatggcttatacatttcttcctcccacacattgctttgggatgatctctgtctgccacatttacccagacattatcagcaaaagcccaggctagatgacgtcagctgtatctaacagcatagcctttaagccaattacaaggagaagttgatggaaagaagtgcagactaatcagatatacccttccaccacttccaaaccctcagctaaggagagaggcttccagctccagcttagaaacatgtagagagcttggaaggcatcactcacatcctcaccacaagcaaaaaggtaaacaaactgaaaaccagcgattcctcttagatccatcagatagctgaggtcacaggacacactgccaccctgaaaactggagaagtaggtggatacagagaatcacaggcaagaccagcttaccaggagcagaagcttctggagccagtaactggtaggaacacttacatggtgactgacacattgtgggaggcagatcatggactggcttgagagtaagactggggccacagttttatgggggtttacctccaggaaccccactgggttctcagtgaaatcagagaaaaatccctttgtgcttctggcaggggtaggagaaaagtaaccattttgaaatatgcctggggaaagttaccattttgaaatatgcccagggtgttctctgaaacaaaggcttgccctcaagagcaatactttactagaaatttttctgacctgggagaaacgcaattagacagctccaccctctcaccgaggaatggaaaaaaagctaacaaatgcctctgaagatcacacagcgcagggactgaaacccatgaaaaacctgagatttattcgtaagattatggattattatatacctcctctcctcaacactgcactattatatcagtaggactccagaagaatgacagtggattgcaactaagagaggtgcaggactccctttaagaagcaattcttcttaaacatactctacttaagaaggaattcttagggatcccaaagacaataggaaagcaataaataaaacaaaacacacacacacacacacacacggaaactagagggaactgatgcctatggcacctgtagctacagcaaacattgagcacagccttgctcctagagattcacatgaaagctcacagtaaaagtctgattacctcagttcctattaccagatacagcatgctcagctctcaacaaaaaattacacaacatgctaaaaggcaagaaaaaatacagtctgaagagataaagcaagcatctgaatcagactcagatatgacacagattttggagttgtcagatggcgaagttaaaataacaataattaatatattaagggctctaactgaatacatagacaatatgcaataattgatgggtaatataaaaagagaatggaaactctaaaaaagaaaagaaaatgctggaaatgaaaaatgctaacaaaatgaagaatgcctttggtgggctcatcagtagaccagacagagccaagggaagaatcagtgagcctgaagatacgtctgtagaaactggaatgcaaaggtgaaaaagaatgggaaaaaaacgaacagcgccttcttatgcactcttctgtctgcctgcaacgagtcctgtttctcaactgccccaagatctctgcctaatgatacttactcaaaaaagcacactctaacctcataccatgctctggagtagacacatatctattgaatgctcttataatagcctgtagttttccttaatagcatttatcaaaattgtaatttaaggattatttctgtatatgtacactaccacccatgactgagaaactgttactagactagcctatccaagagaaagaaaccgtacatctagaaaaaaatattttttttccagataatggacaacgtgcaatacagaactctaatcctcaagtgaagggaaacaaaagggagccctcaatactcccgactcatctggaggcattttcagaccagtgacattactcatttgaagagttgagaacattgcgagcagtgtcaatagtcaatacggcaaatgattttaagtggtttcccttggctctggacgaggcaatgatgtgagtgatactactcagttgtcgtggatttgatagttaatatcatttgaaattacttaataattgacctctataaatagattgtgtggaaccaatcaaaagcaagaatatttttaaagaaaatactaatttagtaaacccaaagtggaatctgcaaaaatgtgttccaactgctggtagtaaaaatatgtaaatacgtaaagaactttttttttttttttttttgagacacagtcttactctgtcacccaggctggagtgcagtggcgcgatctcggctcactgcaacatccgcctcctgggtttaagcgattctcgtgcctcagctgcctgagtagctgggattacagcacacgccaccatgcccagctaatttttgtatttttagtagagatgggggttttgccatgttggccaggctggtcttgaactcctgacctcaagtgatccactagccttggcctcccaaagtgctgggattacaggcgtgagccactgtgcctggcctaaagaactttttccgaggcttagttagagaagttcacaaagcttgcaaaagtttaaggtgtttaaaacctgtggttattcttcagcaggtagtatgcaggaaatatgtaagtctctcttgctgaacaagtaatgtcaaaagtgaacttcatttgctcttatggacttttgttagctctgtgacttttttttccaggaatagaagtcaaatatcctgactagctctgccacacagcagttcagtgacttaacagtaataaagtttgcctgcaattttttaagctcagggctgagggtgaagtttttctgaatgagaagaactttgttcaaccactatcattaaacatgggatgcctttagaaactagcttttgctgcaaacttgatgtttcttaatgaattcaacctcacatttcaaggcaaatcagagcttatgtgcaaagcttattctgctgcaaagtcatttcaatgacaactaatatttgaatcgcaagtaatgtgaaaatgctttatatatttcacatgctgtccaagtttaaaataagaagagatatctccattctcacaaatattttccacacatatggattctgagcacaaactccagttccaacagcattttttagatcctaatgcaaatgcaaaagaaatatacatatttcaaaattcacttaacagtacaactgaggagcatccacccaaacccttcttaatctgcaacgtaacagtgtgctgaaaggcaaacatccaaagaatctaactaaattctataaatgacttccaagcaatggatatgcccaattgaaataatatgcttatggacagataccagcatccaacaatgctatcggtgtgaaagaacatttccaaagatgaactatataaaattttattacagattggcattaacagataagcatttgcaataggttgtttacaataaactttattgagatagaactcacacaccatgcaattcgcccatataaagtgtacagtccaaaagccttgtagtatatattcagagttgcgcgataattagcatgattttagaaaattttcatcattccaaaaagaaactccacatccattagcagtcaccccacattttctccaactctctaaagcccttggagatcaataatttactttctgtctctacagatttgcttattctgaaaatcacacataaatggaaccatacgatatgtggtcctttgttactggcttccttcacccagcacgttttcaaggttgatccatgttgtagcatttatcagtgttttatttctttttattgacaaacaacatttcattatacaaatgtgccacattttgcctactcactcatcagctgatgaacactgggttgtctccactttctattatgaataatgctgctatgaacattcatgtacatatataaatgcttgttttcatttctcttgggtataaatttaggagtggaattgctaagtcacatggtaactctatatttaatctttgaagtaaattccagtctgttttccaaagaggctgcaccattttatactcccaccagcagtgtgtgaaggttccaatttttccacatctttgtcaactttttattaatttttattaaatactataaggagcttcatcattggagggtgttttccaaggagttctctaaatttgatctttgctgagaagtgatttcttaattttagcaaatcctgttgtcttgatgagattatctccaaaaccatgaagccctggatcctttttgtttaatggtctttcctatagtttttaatctctccttatatgttaccataatcaagaagccagatggcacctgcaacactcggtcaggaaatctctctagtgagatcatattaggcacatgttttactttcagtctgccactacgtaagttcttccttcctccagttttccaataacatttacctcactcttctagaagtcctcatctacagccttgtcagacatgatgctgctatagtttcttcaaagcacttgaggtttttaccagcgcatgcctacttaacacccactgccaagttccaaaacccctcccatattttgggttttcattatggcagctgcccacctccaagtaccaagttctgtatcagttatctgttgctgcataacaaattaccccaaaacctaccagttaaaacacgtactaacccagagtttctgggggttaagaagccagaagtgagtggtttagctaggtctttctggctcagcgtctcacatgaggttacaggcaagtagttggctgtggctgcagtcctatttgaaggctcaggcaagagaggatccacttctaagctcactcacatggttgctagaaggccaaagtttgttgctggctgtgggccatgggcttcagttacttactacatggaactctccacaggccgtgtcctcacgataaggcaactggtttctgaaaggacaagtgattcaagagagcacatgcctatgcagaagccacagtcttctcataaccaaatattttaagtgacatcacatcacttctatcatattctatttattagaagtgagtcaaattactattttcctgctgaaaaatttgacatttccatcaatttctggaatggtcactttctgaaacagtgttataatatctaaagtctttgtctcataattccaacatctgtgtcatcttggggttagtgtctgttgtctttgaattgttgaaaatttcctgactcatgtatttcacgtgattctgcattgcatcttggacattttgaatattacgagcctctgggtatttaattcttccagaaaatgttagggtattttttccagcaggcaatttaactggctaagtcttggtgaccagttccaatccatctcctgtgggctgtggttctaatgtcagtccagttttctaagtattctcagtgctatttggatctttgcccagtgtcagacccaaacaattatcgggtcagacctatatatgtatagaccaggggagagccccagattgcataaacaactgttatgaaatcactttcttgaccttccttatctttgtcaccaccttgacaccttccacctctcaggagccacttcctcttcctgatcttcaggttagaaatccaagggtttaggttctcctctctgctacacacctcatggatacatcacctccaggtccaagtagcaggaagatagatagggaagaaaagcaatggggagtctcctaaccctttttggctcacaaatcctctgcccagagtgaagggttcctaactctgaggtttagatgcctgctcagccatctctgtcctcaccacaggaatgcccaggagcgccacaatgatcttgtttcaaattctagtttccttcccaaatctgcctgttgttatcaatcattacttttgagggtccccagacagctgctccatgccttagttacatttagcatgagagataaagtggaacatgctcattccatttaaaggagaactggtaccacctagttactttattgccaatgattacatccctggaggataaactctcaaacaggaacttcctaagaatataaatggagaattctgattgaaagattaatattcatcacttctttatccaatcactttttgcatttttattaaaaattgacacacatagaaaaatgttttaaatgaccaatgaacatccaccacatatagatccaccacaaaaaacaattgactgattttgtacatatttatttgaaaatatgctgtcaacatcatgacttttcaaaacttaaaaaaaaaacttctgcatgcatctcctaagaattagaacattatcctacgtaactcaattatcacttctagaaaaatcaaatataccacattatctactacccattccatcttcctatttccccaaatatccccccaaatgtctcttataggtttttttatgaatcagaagctaataaaggatcacactttccatttggttatgtctcttgtcttaatctagcagagaccactttttgttttactacatttgctttttgaaaagtccagaccagggccaaaatgcacaaactatggcttacaacatcacacccctgcgtagggccagtggaatgtgtgcaagatcagtttggcttcattaactatgaagtaggggatagcaagaagctctttttccatatgaaagaagttgaggatggccttgagctccaggcaggagatgaggtggagttctccgtgattcttcatcagcgcactggcaagtgcagtgcctggaatgtttggcgagtctgtgagggccccaaggctgttgcagctcctcgacctgatcggttggtcagtcgcttgaagaacatcaccctggatgatgccagtgatcctcgcctaatggctcttcgtcagccaaggggaccagataactcaatggggtttggtgcagaaagaaagatccgtcaagctggtgtcattgactaaccacatccacaaagcacgtcattaatccactatgatcaagttgggaggaatctggtgaaggtttctgaatatctccctcttcatccctcccgaaatctggaatacttagttcttttgagctattacaccagttttaacagcttcctcgtgttatgtttaaaaaaataaatttaagaaaaccattttaaaataaatatataaaaaaaagtccagttgtcctataccaactctggacttgtctatttatttccatactgtgtaattcaacttgttcctctattcctgtatttctttaaacaggaagataagtctagacaaaagatttaattaaatttgaggtaaacattttcggcagtacatcaaggatgatcacacatgcttcataccgcatcccatcaagagccacataatgctggcttattccagaagtagtgaaatgcagtttgatagccaaatctcactgtaaaggcaattcttttgcaatagatatctgtgatgttctgacaccttgtaaacaaagttccttaaaattttttccacttaatgggttttaccatcgatttttgccagatttaattacattaagggttgtaaaatggtaatttttccaaatctatcattccatgtacatttaaaagaagacattcttcaaataattgtatagagttttcttttttctctactttcatcattatgaacttcttttccttcttagtattatcaccagtaagagtgattattctaagttgtcctaaatttggccagtgagaataccttcaacttggcgcctgttcccttctgacattaccccattagtcttcaaatactatcttgctttttattttattttcttaataaaaagtattttagccacaccacccacttcccctgctccaaacatggaatcagccatttctccaaggaaccctggttccttttagtggggaatggcatttagaaaccaaaatttgggtactaagcatgctcaccactactgggtacaatgttaaatagtgaggtctgtttaaaagcctcattttctttgtaaatgtatttaaatacataaaataattactttctgataagctaaaaccagtcggttaagaaatatactatactgactgcttgagtttaattctaacatttttctcagaaggtctagctaattgtattagaattttttttaatgataccaactgtgaattgaatgaaaaatcaaatataaaattggaggaaaaacgcctgggaggaattaaacatttaaactgatgaaaggaatgcttaataataaactcttcatatataactttccataaaataattaattcctaaaatatgtgtaataagaaggcaaccttatatgtgaagcctccaaaagcaattacactatctggacctcagctagctttaaggatttaagtacaattataacaaaagcaggcataattagggactcataagaaaaaagaatatagttgtgagtcaattattaagattaaggtgagaggaagcccttaaagataacacagtaactttaaattactgcaactatgtctaaccaggctacaaaacaaatagtactcttgggacctcaggttggaaacgagcctataatgatcacaaaacaccagaaccaaagacctagattctagtcttgactctgttcactaagttcaaatccttcgttagtacaatgaaaggctataattaaactaaaatctctcctggctctaatgagctaccagacatgcagcctgagattctgccaaatacatcccttctgcaacagataacaaagtatgtgcttgacagtctttccagctgcttcagttaatccgccttctacggtactgtaatagtactctgttcagttatataaaaccacatcaatttaagaaataatggaagaaagtaaaagaaagagagtctacctttgggcaagattttaagaactaaattctaaatcaataaaactacattttttaataataaaggacttttatgtttacacacacacatgcatatgtgtatatatgtatgtttacatatataagttgctggtgggacagctcatataaagagctttattatttccatgtgaagagttaaatttaaaattcctttttatgtttagcttctctttatgaaaagaagtgcctcctatgttagccagctattttaaagaaggccacacacttatttacattattaactcagtgactgtttttaaaagaaaattcacatattgaagcttactcttttaaagggaatatggtcttatgagagaaacaaaatgtatattcaactatttttcatgatttttaaaaagaccttttacattttttctatgaattaaatactcataggtttttagataccttagaatttatggttcttttaaaatttaacaagtcagtgctcttcatagtctcactgatcaattttatcatgacttagtggcaactaacatatttccttcaggagaagtaaaaaagacaaatctattaggagtttgtaccctatttattattcccttattccccagtgagaagtcttggattatttgagagatgaactaaacctcataggctttatctcctttaaaaaatctctgatactgggtaagtgaggagctgcagatgaaaggtttcccatattccttccacttatagagtttctctttcgtgtgaacttttttgtgtctacaaaggtttgatctgtaactgtaggctttcccacattccatacatttatacagtttctctccagtgtggatcctctcatgttcggttaaaaatgaatactggctgaaggcctttccacactgattacactgatacggtttctctccagtatgaattctctgatgcctataaaggttagatttgcaaccaaaggctttcccacattcctcacatgtataaagtttttccccagtatgaattttccgatgttcattaaaggatgaatactggttgaaggctttctcacattcgttgcactgataaggtttttgtccagtgtgaattcgctgatgttcgataagggttacaatacgtgtgaaggttctcccacattccaagcatgtatacagttgttctccagtatgaaacctctgatgttcagctagagatgtaaactggctgtatcccttcccacactcactacatttatagggtttctcacctgtatggattctttgatgcctgtgaagttttgctctacagttgaaggccttctcacattcgccgcatttatagagtttctctccagtatgaattctctgatgtacagtgagggttgaacactggctaaaggctttaccacattccctacatcgatacggtttctctccagtatgcactctcagatgtttgataagggttgaactgttgctaaatgccttctcacattcattacacttgtaaggtttctctccagtatgaattctctgatgagaaagaagggatgatctgtggctgaaggttttttcacactcattacatttgtagggtttctcacctgtatgaattctctgatgttcaataagatgcagattctgcttgaagctcttcccacattcattacagatgtgaggttttcctcctgggtaaatctggaagcatttcatgagatcaaaattctgtttaaaatctttcccaaatgtataatacatattgggtatcctttctataggaacactctgttgtgtgacaagagctgtatttgtaaataagcttttccccaattcaagacttgtatggtttccatcttcactgatggttttctcatgcgaatctatcatttgtctaagaggtttcttctcttgctcttcttctatctcgctctcaaattccacagcttcttcaaagttaatgtcccagtgaccatccttaatggattctttctttaccattccctgagatgtttcttctataaaaatgtcctgtctatgaggcaatgcttctgtttcaagccaagtcttgaaacctaaaatgaatcagaagaattaatgcctcctctgctggaagaaacaaactgatgtatcggtgagacaaaaaaactggtaacagtatatatgaaagaagagtgatacaatcagatttcaaatgctgacttgaatcttgggaagaacaggatgggataaaggaaagtgaggtaaacaggttaaggaatggcatgggagaatacactggacaaattaacaatgaaaatgaagcgattccacctggatatagtaaagttagatgcagaagaacaggctgagtagaagatatgaggatacagaaaaatgccaaatgataagcccacgctgaataccatgggatactccactctgtcatcattttccactatgcatataccaggcaatgaagtaggcagcctgtccaccttctccttcttactcacatgtccctttcattacgttttctccccatgctctctctgaaactctatgcccgataatcttttaaatatttggattggttttcttaaatttctttacttcatgtgactgtgattttatattgtagtctgtgaagggggaaacagtctgttaaagagaagacaggccgggcgcggtggctcacacctgtaatcccagcactttgggaggcaggtggatcacctgagctcaggagtttgagaccagcctggagaacatggtgaaaccccgtctctaccaaaaatacaaaaaattagctaggcgtggtggcatgtacctgtggtcccagctactgaggaggctaaggtgaaaggatcgcttgagcctgggaggtggagagtgcagtgagctgtgatcacaccactgcactccggcctgggtgacagagactcatctcaaaaaaaaaaaaaaaaaaaggagtggggggacattcaggttttgaaaatcacaacagccctgcagcatgactgtgatgattctatgtgatcgaagtttaagatgctcattataaaaaagaggaaaacatggagtaaatcacccctgtgcaacaatctgtccctggtgattggaagaataacaatttttttcatattacctttctttttattttcctctttttattttatcacaaagagagacatattcatttcttctaataagctgcaaccaaaagactgcactctctttgtaggaatctcttgagaataatgaaaatctgcaggagatttgaagtcagtatgtcttaaagtcctgaaaaatgcccaagccccaagctcagctttgattctgggtgaaaagatttagttcgaggtgactctaaactactctctgttaaaacctgatttcctttcatcaatccatgatagaaaataggttaacattagataactgcaattaggtaattgtgtgtactttaacctatacaactcaaacaaaatacaactggcctgagcatctcaagaggactcagtatttccaagagtttcccaagaactgcctctttgtgacctacttgtctataaagaaccccttgtgcccatttcccagcctctcacttacctagacgggtatctgaagggacttctctttccaccatgcagggatcttctccttgctgcaactgatgaatcaactttggcattgaaaatggaatccctgctcatgaggaagcaaatgaagtttgaacaaatagcatgaagaccaatcctagaactgacctactactcactctgaaccaacacagcaaagaaggcaagccctgagaggcagacaaggcagcacaagcacttcgcaggggcactggagctgtcaatggccggggaaggtctcagttcagaaccattatagggccctgacaatgaaggcctctaagatggggggtccctatgtgtttttcagaatctaaactgggatctctagtcattggcctactccaaggagggaactgattggcggtaggatgtgagggagagtggagggtagagaaacagatagcaagaagggcatcacaacaaagatgtacactttccactctacagcaattcagcctttctgaggggctcagtagggtacaagaccacaggctcggaaccccaaagatggacctgtgaggcgttcctataacagattcttcgtcataggcaaaaattcttacccagtgagaccaggctgctgtagttctccagcatcacctcccggtacaaggccctctgggcagagtccaggtgcaaccactcgtcctggctgaagaacacggccacatccctgaatgtcacaggctcctgtaatggcaaacccatacctgctcacccaggaccatcttcttcaacggaaaatgcaggaagaaagtgacagtgggatgtacagaaaatctcaggattctaataattcacgtcaactgtttacgtaatttttggaaccacccattagctatttaattaaaaaagtatttatggagtactcattgagaacaatgacacatgccacgtgcagtgggagtaggggaaaacaggcaaagttcctgccaacaggcaatttaaataccagcctgggatctttctcaagagaaggcgatgtgatgacagaagcagagactggagtgctaggctcggaagatggatgagagggccacaagccaagggctgcagggaaccactagacggtgaaaagggcaaggaaacagattttcccctgagagccctagaaggacccagccctgccgacagcctgacctcaagccagtaaaactgaattcagacttctgacttccagaactgtaaaagaatacatttatgctgtttcaagatgctgcatttgtagtaatttgttacagcagcaataagaaagaaatacaatgtgaacaattgaagacaacctacatatctatcaataagggaatggataagcaaatttcagtacatttattccatgaaacgtcatgcagccgctaaatagaatgaggtagatctctatgacactggaatttgaccttcatatattattgattcatatgaaaaagccagccacaaaagaatctatatttgttgaaaaactctacatctgtatatacatatatatgacacatgcacaactatctggaaggatacaagctgtcaccctcgttattctttgatatttgtggagaggggcagaaaagcaatctttcacttattactttatgccctatcattaggcttacagttttttacagttagggagattgtgtgtatgtatgtgtgttcctttgctttgaattttcttaaattccattttattttattttattttatttataattttttttttgagatggagtcttgctctgttgccaggctggagtgcagtggtgcaatctcagctcattgcaacctctgcctcccaggttcaagcaattctcctgcctcagcctcctgagtagctgggactacaggcacataccaccagcttattttttttttttctttttctgagacagagtctcactctgtcgcccaggctagagtgcagtggcgcgatctcagctcactgcaagctctgcctcccgggttcacaccattctcctgcctcagcctcccgagtagctgggactacaggcgcccaccaccacacccggctaatttttttgtatatttgtagagacggggtttcaccatgttggccaggatggtctgatctcttgacctcatgatccacctcctgcctcagcctcccaaaatgctggacttacaggtgtgaaccactacacttggcctattttaacttatatgttgactttgtagttagacctctttgtatttttagtggttactcgaataattataatgtacatttttggttactcatcacctatttagagctaatatatcgtttcacatagaatgcaagaatcttgcaagtatataggacatcaccacccttctttatgctatagttttacaaagattttcccagttcagagagttgacagcacttaccaaacttcactgagcgtattcatgtcaaggtttttattgaaaggcaaagggtacagcacagcaagagaaagagagttcagggaagcactagaaagccaagagacactccatgtgctgtctcccttatttgcacagaccacgccatgactctgggtctgtgtgaagaatcttggtgtgggagagctcaaaggaggaactctcagcaggggcctttttatgtaatcaagcaagtcctgtcaaatcatttaggccagttgcaagccatcagtaaggaagctt
